(19) United States
(12) Patent Application Publication
(10) Pub. No.: US 2019/0382793 A1
(43) Pub. Date: Dec. 19, 2019

(54) Adenoviral Vectors

(71) Applicant: Gene Bridges GMBH, Heidelberg (DE)

(72) Inventors: Adrian Francis Stewart, Dresden (DE); Jun Fu, Dresden (DE); Anja Ehrhardt, Witten (DE); Eric Ehrke-Schulz, Witten (DE); Wenli Zhang, Witten (DE)

(73) Assignee: Gene Bridges GMBH, Heidelberg (DE)

(21) Appl. No.: 16/090,941

(22) PCT Filed: Apr. 6, 2017
(86) PCT No.: PCT/EP2017/058306

§ 371 Date: Oct. 3, 2018

(30) Foreign Application Priority Data
Apr. 6, 2016 (GB) 1605903.2

(51) Int. Cl. C12N 15/86; C12N 9/22; C12N 15/11; C12N 7/00

(52) U.S. Cl. CPC C12N 15/86; C12N 9/22; C12N 15/11; C12N 2800/80; C12N 2710/10021; C12N 2710/10043; C12N 2310/20; C12N 7/00

(57) ABSTRACT

The invention relates to adenoviral vectors, cells for use in generating adenoviral vectors, methods for generating adenoviral vectors, and therapeutic uses of adenoviral vectors in gene therapy, tumour therapy and as vaccines.

### FIELD OF THE INVENTION

[0001] The invention relates to adenoviral vectors, cells for use in generating adenoviral vectors, methods for generating adenoviral vectors, and therapeutic uses of adenoviral vectors in gene therapy, tumour therapy and as vaccines.

### BACKGROUND TO THE INVENTION

[0002] Adenoviruses (Ad) are non-enveloped dsDNA viruses, typically 26-46 kb in length, flanked by inverted terminal repeats (ITR) at both ends. An increasing number of human and nonhuman Ad types are being identified. Besides the fact that adenoviruses are emerging pathogens in immunocompromised patients, they represent the most frequently used vector type for tumour therapy, gene therapeutic approaches and vaccination studies, largely owing to their robust gene delivery efficiencies and the ability to transduce a broad variety of cell types. However, exploration of the complete natural adenovirus diversity for broad applications has been absent because an efficient high throughput cloning (HTC) system has been lacking.

[0003] In recent years, adenoviruses have received increasing attention both as human and veterinary pathogens and as emerging therapeutics. As pathogens, adenoviruses cause a multitude of infections with growing numbers of fatalities. An effective treatment is lacking and lethality in immune-compromised patients amounts to 70%. As therapeutics, adenoviruses belong to the currently most promising candidates in the group of advanced-therapy medicinal products (ATMPs), with high potential for the treatment of malignant tumours as oncolytic viruses, as genetic vaccines against infectious diseases, and as gene transfer vectors for gene therapy applications. Increasing numbers of novel adenovirus types are being identified and it has become clear that adenoviruses comprise an enormous natural diversity of several hundred entities. However, most scientific knowledge on the virology of adenoviruses is based on a very small number of human type C adenoviruses, in particular human adenovirus 5 (HAdV-05), despite the fact that the sequence diversity of the many adenovirus types is reflected in differences in their biology (e.g. tropism, infectious cycle, host interaction, persistence, immune evasion) and also in their virulence. Similarly, HAdV-05 has served for many clinical tumour and gene therapy applications despite there being evidence that its therapeutic efficacy is strongly limited.

[0004] Gene therapy is an emerging field where therapeutic nucleic acids are delivered into target cells of interest. Recent success stories include the treatment of rare genetic diseases such as Wiskott-Aldrich syndrome¹, hemophilia B², and metachromatic leukodystrophy³. Adenovirus-based vectors represent the most frequently used vector types worldwide^{4,5} for tumour therapy, gene therapeutic approaches, and vaccination studies, largely owing to their robust gene delivery properties and the ability to transduce a broad variety of cell types. First clinical trials utilising recombinant adenovirus for cystic fibrosis were initiated in 1993⁶. Adenoviral vectors gained global attention as a gene therapeutic agent when Gendicine was approved by the Chinese food and drug administration in 2003 for treatment of head and neck cancers⁷. Another option to treat malignancies is the use of tumour-specific replication competent adenoviruses for oncolytic virotherapy. In combination with chemotherapies and with further improvements, biologicals such as oncolytic viruses are being evaluated in clinical trials, which are likely to herald a growing repertoire of applications⁸.

[0005] Although ˜70 types of human Ad and numerous nonhuman Ad (>200) have been identified so far, a system for efficient Ad genome cloning and manipulation has been lacking. Previous studies have suggested using homologous recombination based techniques to clone adenoviral genomes into plasmids (Chartier, C. et al. (1996) Efficient generation of recombinant adenovirus vectors by homologous recombination in Escherichia coli. J. Virol. 70, 4805-4810; Renaut, L. et al. (2002) A rapid and easy method for production and selection of recombinant adenovirus genomes. J Virol Methods 100, 121-31). However, the homologous recombination in the bacterial strains used in these studies is highly inefficient, and these systems therefore require long homology arms and pure concentrated forms of adenoviral DNA. Accordingly, the majority of recombinant adenoviral vectors (AdVs) are still based on only a small fraction of Ad types and their variants^{9,10,13}. However, predefined tissue tropism and pre-existing immunity considerably limit their applications. Limitations of vectors and oncolytic viruses based on HAd5 include cell tropism and pre-existing immunity in the human population against HAd5. HAd5 has a strong liver tropism in mice, as well as in humans when delivered intravenously, which is associated with a high innate immunity toxicity profile and sequestration of virus in the liver. The high seroprevalence of HAd5 in the human population results in induction of robust adaptive immune responses against vectors and oncolytic viruses based on this serotype, which hinder their effectiveness. Immune responses and liver sequestration of such vectors and viruses also mean that high doses are often administered to circumvent these problems, risking liver injury and inflammatory shock syndrome.

[0006] The present invention addresses the problems of pre-existing immunity and limited cell tropism of existing adenovirus vectors and oncolytic adenoviruses. By providing a novel engineered library of human adenoviral genomes, the inventors have facilitated the development of a vast repertoire of new adenoviral vectors and oncolytic viruses that can be used greatly to expand the range of possible applications, with the potential to improve therapeutic efficacy.

### SUMMARY OF THE INVENTION

[0007] The present invention is based on the generation of a novel engineered full-genome, type-specific human adenovirus (HAdV) library made through novel recombineering technologies. This library provides the tools for arbitrary genetic modification of viral genomes and allows the generation of new adenoviral vectors, vaccines and oncolytic viruses, for example with improved efficacy and safety.

[0008] The inventors have established that adenoviral genomes can be high-throughput cloned (HTC) and tagged by using advanced linear-linear homologous recombination (LLHR) and linear-circular homologous recombination (LCHR) techniques^{11,12}. Wild-type Ad from clinical isolates, including around half of the currently known adenovirus types, were propagated and direct high throughput cloning applied. The integrity of cloned Ad genomes was confirmed by DNA restriction pattern and virus reconstitution, and next-generation sequencing (NGS) and phylogenetic analysis was performed. The recombinant TurboGFP fluorescent/NanoLuc luciferase double reporter-marked AdVs facilitate vector characterisation and in vivo imaging. This new engineered adenoviral library will facilitate broader applications in molecular medicine including gene therapy and vaccination studies, as well as basic virology. The library of cloned genomes provided by the inventors facilitates generation of various vector types, genetic modification, insertion of transgenes, and tagging with reporter genes of adenoviruses of various different serotypes, using the methods disclosed herein. Such a system for straightforward manipulation of adenoviral genomes has been lacking.

[0009] The library provides for an improved scientific understanding of viral and host factors that determine the type-specific interactions of adenoviruses with their host, e.g. as regards tissue tropism, virus persistence, pathogenesis and virulence, and those factors essential to address potential risks associated with newly evolving adenoviruses. This library can also be used to screen for potential new drug targets for anti-adenoviral therapeutic strategies.

[0010] In one aspect, the invention provides adenoviral vectors with sequences derived from the newly-cloned adenoviral genomes in the library. Vectors comprising these novel sequences have various advantages of therapeutic potential, including altered cell tropisms relative to HAdV5-based vectors, so facilitating the targeting of different cell types, and/or the avoidance of pre-existing immunity against the HAdV5 serotype. For example, in one embodiment, the invention provides an adenoviral vector comprising a sequence derived from an adenoviral genome sequence contained within any one of SEQ ID Nos 1-32 and/or 1411, for example, contained within any one of SEQ ID Nos 1-15, 17-32 and/or 1411 or contained within any one of SEQ ID NOs: 1-3, 5-8, 10-12, 14-15, 17-25 and 27-32 and/or 1411, or contained within any one of SEQ ID NOs: 1-3, 5-8, 10-12, 14-15, 17-25 and 27-32, or a sequence at least 50% identical thereto. In another embodiment, the invention provides an adenoviral vector comprising the full adenoviral genome sequence contained within any one of SEQ ID Nos 1-32 and/or 1411, for example, contained within any one of SEQ ID Nos 1-15 and 17-32 and/or 1411 or contained within SEQ ID NOs: 1-3, 5-8, 10-12, 14-15, 17-25 and 27-32 and/or 1411, or contained within any one of SEQ ID NOs: 1-3, 5-8, 10-12, 14-15, 17-25 and 27-32, or a sequence at least 50% identical thereto. Preferably, the degree of sequence identity is at least 60%, 70%, 80%, 85%, 90%, 95%, 96%, 97%, 98%, 99%, 99.5% or 99.9%.

[0011] In another embodiment, the adenoviral vector lacks the E1 region. For example, in some embodiments, the invention provides an adenoviral vector comprising the adenoviral genome sequence contained within any one of the sequences listed in SEQ ID Nos 1-32 and/or 1411, for example, contained within any one of SEQ ID Nos 1-15 and 17-32 and/or 1411, or contained within any one of SEQ ID NOs: 1-3, 5-8, 10-12, 14-15, 17-25 and 27-32 and/or 1411, or a sequence at least 50% identical thereto, that lacks the E1 region. In one embodiment, the invention provides an adenoviral vector comprising a sequence selected from SEQ ID NOs: 1-3, 5-8, 10-12, 14-15, 17-25 and 27-32, or a sequence at least 50% identical thereto, that lacks the E1 region. Preferably, the degree of sequence identity is at least 60%, 70%, 80%, 85%, 90%, 95%, 96%, 97%, 98%, 99%, 99.5% or 99.9%.

[0012] In another embodiment, the adenoviral vector lacks the E1 region and the E3 region. For example, in some embodiments, the invention provides an adenoviral vector comprising the adenoviral genome sequence contained within any one of the sequences listed in SEQ ID Nos 1-32 and/or 1411, for example, contained within any one of SEQ ID Nos 1-15 and 17-32 and/or 1411 or contained within any one of SEQ ID NOs:1-8, 10-12, 14-15 and 17-32 and/or 1411, or a sequence at least 50% identical thereto, that lacks the E1 region and the E3 region. In another embodiment, the invention provides an adenoviral vector comprising a sequence selected from SEQ ID NOs:1-8, 10-12, 14-15 and 17-32, or a sequence at least 50% identical thereto, that lacks the E1 region and the E3 region. Preferably, the degree of sequence identity is at least 60%, 70%, 80%, 85%, 90%, 95%, 96%, 97%, 98%, 99%, 99.5% or 99.9%.

[0013] In another embodiment, the adenoviral vector lacks the E3 region. For example, in some embodiments, the invention provides an adenoviral vector comprising the adenoviral genome sequence contained within any one of the sequences listed in SEQ ID Nos 1-32 and/or 1411, for example, contained within any one of SEQ ID Nos 1-15 and 17-32 and/or 1411 or contained within any one of SEQ ID NOs:1-3, 5-12, 14-15 and 17-32 and/or 1411, or a sequence at least 50% identical thereto, that lacks the E3 region. In another embodiment, the invention provides an adenoviral vector comprising a sequence selected from SEQ ID NOs:1-3, 5-12, 14-15 and 17-32, or a sequence at least 50% identical thereto, that lacks the E3 region. Preferably, the degree of sequence identity is at least 60%, 70%, 80%, 85%, 90%, 95%, 96%, 97%, 98%, 99%, 99.5% or 99.9%.

[0014] In another embodiment, the invention provides a library of adenoviral vectors comprising at least 2 (for example, at least 3, 4, 5, 6, 7, 8, 9, 10, 11, 12, 13, 14, 15, 16, 17, 18, 19, 20, 21, 22, 23, 24, 25, 26, 27, 28, 29, 30, 31, 32, or 33) of the adenovirus genome sequences described in SEQ ID NOs 1-32 and 1411, for example, of the adenovirus genome sequences described in SEQ ID NOs: 1-3, 5-8, 10-12, 14-15, 17-25 and 27-32 and/or 1411, and/or the other adenoviral vectors described herein. In some embodiments these adenoviral sequences are contained within a plasmid backbone.

[0015] In another embodiment, the invention provides an adenoviral vector comprising the 5′ and 3′ inverted terminal repeat (ITR) sequences from an adenoviral genome sequence disclosed herein. Preferably the 5′ and 3′ ITR regions are taken from the same adenoviral genome and are present at the 5′ end and the 3′ end, respectively, of the vector. Such vectors are used in conjunction with an adenovirus helper vector according to the invention. For example, in some embodiments, the invention provides an adenoviral vector comprising the 5′ ITR sequence contained within any one of the sequences listed in SEQ ID Nos 1-32 and/or 1411, or a sequence at least 80% identical to the 5′ ITR sequence, at the 5′ end, and comprising the 3′ ITR sequence contained within any one of the sequences listed in SEQ ID Nos 1-32 and/or 1411, or a sequence at least 80% identical to the 3′ ITR sequence, at the 3′ end. For example, in some embodiments, the invention provides an adenoviral vector comprising the 5′ ITR sequence contained within any one of the sequences listed in SEQ ID Nos 1-15 and 17-32 and/or 1411 or contained within any one of SEQ ID NOs: 1-13 and 18-32 and/or 1411, or a sequence at least 80% identical to the 5′ ITR sequence, at the 5′ end, and comprising the 3′ ITR sequence contained within any one of the sequences listed in SEQ ID Nos 1-15 and 17-32 and/or 1411 or contained within any one of SEQ ID NO: 1-13 and 18-32 and/or 1411, or a sequence at least 80% identical to the 3′ ITR sequence, at the 3′ end. For example, in some embodiments, the invention provides an adenoviral vector comprising a sequence selected from the sequences contained within any one of SEQ ID Nos 1-32 and/or 1411 at the positions defined in Table 1 column 4 or a sequence at least 80% identical thereto, at the 5′ end, and at the positions defined in Table 1, column 5, or a sequence at least 80% identical thereto, at the 3′ end. In some such embodiments, the invention provides an adenoviral vector comprising a sequence selected from the sequences contained within any one of SEQ ID Nos 1-15 and 17-32 and/or 1411 or contained within any one of SEQ ID NO: 1-13 and 18-32 and/or 1411 at the positions defined in Table 1, column 4 or a sequence at least 80% identical thereto, at the 5′ end, and at the positions defined in Table 1, column 5, or a sequence at least 80% identical thereto, at the 3′ end.

TABLE 1
Positions of inverted terminal repeats (ITRs) in genome sequences

| | | Positioning in genome sequence | | |
|---|---|---|---|---|
| Adeno- | Genome | | 5′ITR + packaging | |
| virus | SEQ ID NO | 5′ITR | signal | 3′ ITR |
| A12 | 1 | 120-280 | 120-619 | 34095-34255 |
| A18 | 2 | 122-288 | 122-621 | 34088-34254 |
| A31 | 3 | 122-271 | 122-621 | 33777-33925 |
| B3 | 4 | 8-143 | 8-507 | 35214-35350 |
| B7 | 5 | 141-276 | 141-640 | 35210-35445 |
| B16 | 6 | 9-122 | 9-508 | 35418-35530 |
| B21 | 7 | 120-231 | 120-619 | 35423-35534 |
| B50 | 8 | 120-233 | 120-619 | 35392-35505 |
| B11 | 9 | 122-223 | 122-621 | 34816-35298 |
| B14a | 10 | 60-196 | 60-559 | 32328-32464 |
| B14b | 11 | 120-256 | 120-619 | 34747-34879 |
| B34 | 12 | 258-394 | 258-757 | 34896-35032 |
| B35 | 13 | 108-244 | 108-607 | 34761-34897 |
| C1 | 14 | 9-111 | 9-508 | 35906-36008 |
| C2 | 15 | 8-110 | 8-507 | 35842-35944 |
| C5 | 16 | 9-111 | 9-508 | 35840-35942 |
| C6 | 17 | 10-111 | 10-509 | 35667-35767 |
| D8 | 18 | 1-130 | 1-500 | 31390-31514 |
| D9 | 19 | 278-436 | 278-777 | 35044-35204 |
| D10 | 20 | 1-148 | 1-500 | 34938-35085 |
| D13 | 21 | 1-145 | 1-500 | 35062-35217 |
| D17 | 22 | 1-146 | 1-500 | 34998-35136 |
| D20 | 23 | 1-145 | 1-500 | 35031-35177 |
| D24 | 24 | 1-146 | 1-500 | 35580-35727 |
| D25 | 25 | 1-146 | 1-500 | 35105-35249 |
| D26 | 26 | 1-146 | 1-500 | 34987-35132 |
| D27 | 27 | 1-158 | 1-500 | 35000-35145 |
| D33 | 28 | 1-146 | 1-500 | 34966-35121 |
| D37 | 29 | 1-159 | 1-500 | 35056-35214 |
| D69 | 30 | 1-148 | 1-500 | 35001-35148 |
| E4 | 31 | 1-116 | 1-500 | 35877-35992 |
| G52 | 32 | 120-170 | 120-619 | 34885-34943 |
| F41 | 1411 | 1-155 | 1-500 | 34032-34189 |

[0016] In another embodiment, the invention provides an adenoviral vector comprising a sequence selected from SEQ ID NOs:33-45 and 50-64, or a sequence at least 80% identical thereto, at the 5′ end, and a sequence selected from SEQ ID NOs:97-109 and 114-128, or a sequence at least 80% identical thereto, at the 3′ end. Such vectors are used in conjunction with an adenovirus helper vector according to the invention. For example, in one embodiment, the invention provides an adenoviral vector comprising the sequence provided in Table 3, column 2 (headed “500 bp 5′ UTR”) of an adenovirus selected from B3, B16, C1, C2, C5, C6, D10, D13, D20, D24, D25, D26, D27, D33, D37, D69 and E4, or a sequence at least 80% identical thereto, at the 5′ end, and comprising the sequence provided in Table 3, column 4 (headed “150 bp 3′ ITR”) of an adenovirus selected from B3, B16, C1, C2, C5, C6, D10, D13, D20, D24, D25, D26, D27, D33, D37, D69 and E4, or a sequence at least 80% identical thereto, at the 3′ end. Preferably, the 5′ and 3′ sequences are derived from the same adenovirus.

[0017] In a further embodiment, the invention provides an adenoviral vector comprising a fiber gene from a genome sequence provided herein. For example, the invention provides an adenoviral vector comprising a fiber gene selected from any one of SEQ ID NOs 129-160 and 1443, for example, any one of SEQ ID NOs 129-160, or a sequence at least 70% identical thereto. In a further embodiment, the invention provides an adenoviral vector comprising a fiber gene selected from SEQ ID NOs:130-131, 135, 138-140, 142, 145-146, 149, 151, 153, 155 and 158-160, or a sequence at least 70% identical thereto. In some embodiments, the adenoviral vector does not contain any regions coding for adenoviral proteins other than these fiber proteins. The invention also provides adenoviral helper vectors with the same features.

[0018] The vector may further or alternatively comprise a penton gene selected from any one of SEQ ID NOs 161-192 and 1426, for example, any one of SEQ ID NOs: 161-192, for example selected from SEQ ID NOs:161-175 and 177-192, or a sequence at least 70% identical thereto, and/or a hexon gene selected from any one of SEQ ID NOs 193-224 and 1431, for example, any one of SEQ ID NOs:193-224, for example, selected from SEQ ID NOs:193-207 and 209-224, or a sequence at least 70% identical thereto.

[0019] The adenoviral vectors of the invention may be used as adenoviral vaccine vectors comprising a gene encoding an antigen, for example from human immunodeficiency virus (HIV), Ebolavirus, Zika virus, hepatitis B virus, hepatitis C virus, influenza virus, Mycobacterium tuberculosis, or Plasmodium falciparum.

[0020] The invention also provides an adenoviral helper vector comprising the adenoviral genome sequence contained within any one of SEQ ID NOs:1-32 and/or 1411, for example, contained within any one of SEQ ID NOs: 1-13 and 18-32 and 1411 or contained within any one of SEQ ID NOs: 1-13 and 18-32, or a sequence at least 50% identical thereto, that lacks the E1 region and comprises loxP sites (SEQ ID NO:221) or FRT sites (SEQ ID NO:222), wherein the loxP or FRT sites are positioned such that the first is downstream of the part of the sequence corresponding to the 5′ITR and upstream of the packaging signal (Table 1, column 4), and the second is upstream of the position of the deleted E1 region and downstream of the part of the sequence corresponding to the 5′ITR and packaging signal (Table 1, column 4).

[0021] The invention also provides an adenoviral helper vector comprising a sequence selected from SEQ ID NOs:1-13 and 18-32, or a sequence at least 50% identical thereto, that lacks the E1 region and comprises loxP sites (SEQ ID NO:221) or FRT sites (SEQ ID NO:222), wherein the loxP or FRT sites are positioned such that the first is downstream of the part of the sequence corresponding to SEQ ID NOs:65-77 and 82-96, respectively, and the second is upstream of the position of the deleted E1 region and downstream of the part of the sequence corresponding to SEQ ID NOs:33-45 and 50-64, respectively.

[0022] The invention also provides a cell encoding, and capable of expressing, an adenoviral E1 region contained within any one of SEQ ID Nos 1-32 and/or 1411, or a sequence at least 70% identical to said E1 region. In some embodiments, the invention provides a cell encoding, and capable of expressing, an adenoviral E1 region selected from within any one of SEQ ID NOs: 1-3, 5-8, 10-12, 14-15, 17-25, 27-32 and 1411, for example, selected from SEQ ID NOs: 1-3, 5-8, 10-12, 14-15, 17-25 or 27-32, or a sequence at least 70% identical to said E1 region. The cell may further express Cre recombinase or Flp recombinase. Such cells are used for producing adenovirus vectors according to the invention.

[0023] In another embodiment, the invention provides an oncolytic adenoviral vector comprising an E1 region selected from SEQ ID NOs 1-32 and 1411, for example, selected from SEQ ID NOs:1-8, 10-12, 14-15, 18-25, 27-32 or 1411, or for example selected from SEQ ID NOs:1-8, 10-12, 14-15, 18-25 or 27-32, or a sequence at least 70% identical to said E1 region. The oncolytic vector may further comprise:
[0024] a) an E2 region derived from SEQ ID NOs 1-32 and 1411, for example selected from SEQ ID NOs:1-8, 10-12, 14-15, 18-25, 27-32 or 1411, or for example selected from SEQ ID NOs:1-8, 10-12, 14-15, 18-25 or 27-32, or a sequence at least 70% identical to said E2 region;
[0025] b) an E4 region derived from SEQ ID NOs 1-32 and 1411, for example selected from SEQ ID NOs:1-8, 10-12, 14-15, 18-25, 27-32 or 1411, or for example selected from SEQ ID NOs:1-8, 10-12, 14-15, 18-25 or 27-32, or a sequence at least 70% identical to said E4 region;
[0026] c) an L1 region derived from SEQ ID NOs 1-32 and 1411, for example selected from SEQ ID NOs:1-8, 10-12, 14-15, 18-25, 27-32 or 1411, or for example selected from SEQ ID NOs:1-8, 10-12, 14-15, 18-25 or 27-32, or a sequence at least 70% identical to said L1 region;
[0027] d) an L2 region derived from SEQ ID NOs 1-32 and 1411, for example selected from SEQ ID NOs:1-8, 10-12, 14-15, 18-25, 27-32 or 1411, or for example selected from SEQ ID NOs:1-8, 10-12, 14-15, 18-25 or 27-32, or a sequence at least 70% identical to said L2 region;
[0028] e) an L3 region derived from SEQ ID NOs 1-32 and 1411, for example selected from SEQ ID NOs:1-8, 10-12, 14-15, 18-25, 27-32 or 1411, or for example selected from SEQ ID NOs:1-8, 10-12, 14-15, 18-25 or 27-32, or a sequence at least 70% identical to said L3 region;
[0029] f) an L4 region derived from SEQ ID NOs 1-32 and 1411, for example selected from SEQ ID NOs:1-8, 10-12, 14-15, 18-25, 27-32 or 1411, or for example selected from SEQ ID NOs:1-8, 10-12, 14-15, 18-25 or 27-32, or a sequence at least 70% identical to said L4 region; and
[0030] g) an L5 region derived from SEQ ID NOs 1-32 and 1411, for example selected from SEQ ID NOs:1-8, 10-12, 14-15, 18-25, 27-32 or 1411, or for example selected from SEQ ID NOs:1-8, 10-12, 14-15, 18-25 or 27-32, or a sequence at least 70% identical to said L5 region.

[0031] The E1 and/or E2 region of the oncolytic vector may be mutated or partially deleted to enhance replication activity and/or tumour specificity.

[0032] In embodiments in which the vectors comprise multiple different regions, these multiple regions may be derived from the same adenovirus genome or from different adenoviral genomes.

[0033] The oncolytic adenoviral vectors of the invention may further comprise:
[0034] a) a gene that enhances replication;
[0035] b) an immune-modulatory transgene;
[0036] c) a suicide gene or an interfering nucleic acid that enhances cell killing;
[0037] d) a gene or interfering nucleic acid that renders cells more sensitive to apoptosis or therapy with other drugs;
[0038] e) a tumour- or tissue-selective promoter; and/or
[0039] f) a gene for modulation of the tumour microenvironment.

[0040] The adenoviral vectors of the invention may be used in therapy. The invention also provides a method of treatment comprising administering an adenoviral vector of the invention to a patient. In some embodiments, the adenoviral vector comprises a transgene. In some embodiments, the invention comprises treating cancer comprising administering an adenoviral vector as described herein that is oncolytic for cells of the cancer.

[0041] The invention also provides a method of generating an adenoviral vector or helper vector, a cell, or an oncolytic adenoviral vector as defined above.

[0042] The invention further provides a method of inserting one or more transgenes into an adenoviral vector or helper vector or an oncolytic adenoviral vector according to the invention.

[0043] The invention also provides an adenoviral genome sequence selected from within any one of SEQ ID NOs 1-32 and 1411, for example, selected from within any one of SEQ ID NOs:1-3, 5-12, 14-15, 17-32 and 1411, or selected from within any one of SEQ ID NOs:1-3, 5-12, 14-15 and 17-32, comprising one or more reporter genes and means for their expression, replacing part or all of the E3 region. For example, the invention provides an adenoviral sequence selected from SEQ ID NOs:1-3, 5-12, 14-15 and 17-32, comprising one or more reporter genes and means for their expression, replacing part or all of the E3 region. Vectors comprising such sequences are also provided.

[0044] The invention also provides a method of screening for anti-adenoviral drugs, comprising:
[0045] a) infecting a cell with a vector comprising the adenoviral sequence within any one of the sequences selected from SEQ ID NOs: 1-3, 5-12, 14-15 and 17-32, comprising one or more reporter genes, and means for their expression, replacing part or all of the E3 region, in the presence and in the absence of a drug of interest;
[0046] b) detecting the expression level of the reporter gene product in the presence and in the absence of the drug; and
[0047] c) comparing the expression level of the reporter gene product in the presence and in the absence of the drug.

### Definitions

[0048] In order to facilitate the understanding of the present description, the meaning of some terms and expressions in the context of the invention will be explained below. Further definitions will be included throughout the description as necessary.

[0049] “Sequence identity” as defined herein means sequence identity determined by the Smith-Waterman homology search algorithm as implemented in MPSRCH program (Oxford Molecular) using an affine gap search with parameters: gap penalty 10, gap extension penalty 0.5.

[0050] The term “high-capacity adenoviral vector” refers to an adenoviral vector that comprises only non-coding adenoviral sequences, and lacks all adenoviral coding regions.

[0051] “First generation adenoviral vector” refers to an adenoviral vector lacking the E1 and/or E3 regions.

[0052] An “adenoviral helper vector” is an adenoviral vector which provides the required early and late proteins necessary for replication, and is used in conjunction with high-capacity or “helper-dependent” vectors to allow their construction and propagation.

[0053] The term “transgene” refers to a gene or genetic material from a heterologous organism or virus. A transgene inserted into an adenoviral vector or oncolytic adenovirus will be a gene that is not derived from that particular adenovirus. The gene may be derived from any other organism or virus.

[0054] The term “expression cassette” (in relation to a transgene or antigen) refers to the transgene or antigen to be expressed, in conjunction with means for its expression (e.g. a promoter).

[0055] The term “antigen” in the present disclosure refers to an immunogenic protein that is not endogenous to the adenovirus of interest, i.e. it is encoded by a transgene derived from a heterologous organism or virus.

[0056] The term “immunomodulatory” refers to the inhibition or reduction of one or more biological activities of the immune system and includes, but is not limited to, downregulation of immune responses and inflammatory states as well as changes in cytokine profile, cytotoxic activity and antibody production.

[0057] The term “therapy” or “treatment” refers to treatment of a disease or disease pathology, and includes both therapeutic and prophylactic treatment. The term is not limited to curative treatment and covers any beneficial effect on disease processes (e.g. reducing the risk of, slowing, halting or reversing a disease process).

[0058] The term “about” refers to a range of ±10% of the stated value.

[0059] The term “comprising” encompasses “including” as well as “consisting” e.g. a composition “comprising” X may consist exclusively of X or may include something additional e.g. X+Y.

[0060] Where the invention refers to a sequence that has at least X % sequence identity with another sequence, in alternative embodiments, the invention further comprises sequences having a higher level of sequence identity with that sequence. For example, if a sequence is said to have at least 50% sequence identity with another sequence, then in alternative embodiments, a sequence having at least 55%, 60%, 65%, 70%, 75%, 80%, 85%, 90%, 95%, 97%, 98%, 99%, 99.5%, 99.8%, 99.9% is also provided.

[0061] When referring to the adenovirus type, this may be in the form of the species and number, e.g. adenovirus C5, or simply by “Ad” followed by the number, e.g. Ad5. These terms are used interchangeably and have the same meaning.

### DETAILED DESCRIPTION OF THE INVENTION

[0062] The adenovirus library generated by the present inventors forms the basis for the generation of new adenovirus vectors, vaccines and oncolytic adenoviruses, as described below. In many cases, the novel sequences from the newly-cloned adenoviruses confer improved properties on the vectors and oncolytic viruses.

[0063] The sequences of the newly-cloned adenoviral genomes are given in the sequence listing. Table 2 summarises the SEQ ID NOs corresponding to each cloned genome.

TABLE 2
Cloned adenovirus genome sequences

| Adenovirus | SEQ ID NO |
|---|---|
| A12 | SEQ ID NO: 1 |
| A18 | SEQ ID NO: 2 |
| A31 | SEQ ID NO: 3 |
| B3 | SEQ ID NO: 4 |
| B7 | SEQ ID NO: 5 |
| B16 | SEQ ID NO: 6 |
| B21 | SEQ ID NO: 7 |
| B50 | SEQ ID NO: 8 |
| B11 | SEQ ID NO: 9 |
| B14a | SEQ ID NO: 10 |
| B14b | SEQ ID NO: 11 |
| B34 | SEQ ID NO: 12 |
| B35 | SEQ ID NO: 13 |
| C1 | SEQ ID NO: 14 |
| C2 | SEQ ID NO: 15 |
| C5 | SEQ ID NO: 16 |
| C6 | SEQ ID NO: 17 |
| D8 | SEQ ID NO: 18 |
| D9 | SEQ ID NO: 19 |
| D10 | SEQ ID NO: 20 |
| D13 | SEQ ID NO: 21 |
| D17 | SEQ ID NO: 22 |
| D20 | SEQ ID NO: 23 |
| D24 | SEQ ID NO: 24 |
| D25 | SEQ ID NO: 25 |
| D26 | SEQ ID NO: 26 |
| D27 | SEQ ID NO: 27 |
| D33 | SEQ ID NO: 28 |
| D37 | SEQ ID NO: 29 |
| D69 | SEQ ID NO: 30 |
| E4 | SEQ ID NO: 31 |
| G52 | SEQ ID NO: 32 |

[0064] In addition to the cloned adenoviruses recited in Table 1, SEQ ID NO: 1411 corresponds to the sequence of the newly-cloned F41 adenovirus genome. Sequence variants of the B11, D8 and D17 adenoviruses are contained within SEQ ID NOs 1413, 1414 and 1415 respectively. It will be understood that any embodiments of the invention related to SEQ ID NOs 9, 18 and 22 may also be extrapolated to encompass SEQ ID NOs 1413, 1414 and 1415 respectively, if required.

[0065] Sequences of individual transcription units and genes of particular importance from the novel cloned adenoviruses are also provided in the sequence listing. The SEQ ID NOs of these genes are set out in the tables below, together with an indication of the function of relevant genes. Any plasmid sequences contained at the 5′ and/or 3′-ends of the genome sequences in SEQ ID Nos 1-32 and 1411 would be straightforward for a person skilled in the art to identify, as they would simply identify the ITRs of the adenovirus genomes, which are known in the art, and are known to define the ends of the adenovirus genome.

### Non-Coding Regions for High-Capacity Adenoviral Vectors

[0066] Non-coding regions from the 5′ and 3′ untranslated regions of the adenoviral genomes are important in generating high-capacity adenoviral vectors of the invention (see below). High-capacity adenoviral vectors comprise 5′ and 3′ inverted terminal repeats (ITRs), which are included in high-capacity adenoviral vectors. These are found within around 150 bp of each end of the viral genome. The 5′ region also comprises the packaging signal 4). This ensures that the DNA is packaged into virus particles. The packaging signal is found within 500 bp of the 5′ end of the genome, downstream of the 5′ ITR. The positions of the regions in SEQ IDs 1-32 and 1411 which contain the 5′ITR, the 5′ITR and the packaging signal, and the 3′ITR are shown in Table 1.

[0067] The sequences comprising the 500 bp and 150 bp of the 5′-end, and the 150 bp of the 3′-end of SEQ IDs 1-32 are shown in Table 3. Some of these sequences comprise plasmid sequence. However, the 150 bp 5′UTR and 150 bp 3′ITR SEQ ID NOs corresponding to the B3, B16, 01, C2, C5, C6, D10, D13, D20, D24, D25, D26, D27, D33, D37, D69 and E4 adenoviruses in Table 3 do comprise the 5′ITRs and the 3′ITRs, respectively as defined in Table 1.

TABLE 3
key non-coding regions

| Adenovirus | 500 bp 5′ UTR | 150 bp 5′ UTR | 150 bp 3′ ITR |
|---|---|---|---|
| A12 | SEQ ID NO: 33 | SEQ ID NO: 65 | SEQ ID NO: 97 |
| A18 | SEQ ID NO: 34 | SEQ ID NO: 66 | SEQ ID NO: 98 |
| A31 | SEQ ID NO: 35 | SEQ ID NO: 67 | SEQ ID NO: 99 |
| B3 | SEQ ID NO: 36 | SEQ ID NO: 68 | SEQ ID NO: 100 |
| B7 | SEQ ID NO: 37 | SEQ ID NO: 69 | SEQ ID NO: 101 |
| B16 | SEQ ID NO: 38 | SEQ ID NO: 70 | SEQ ID NO: 102 |
| B21 | SEQ ID NO: 39 | SEQ ID NO: 71 | SEQ ID NO: 103 |
| B50 | SEQ ID NO: 40 | SEQ ID NO: 72 | SEQ ID NO: 104 |
| B11 | SEQ ID NO: 41 | SEQ ID NO: 73 | SEQ ID NO: 105 |
| B14a | SEQ ID NO: 42 | SEQ ID NO: 74 | SEQ ID NO: 106 |
| B14b | SEQ ID NO: 43 | SEQ ID NO: 75 | SEQ ID NO: 107 |
| B34 | SEQ ID NO: 44 | SEQ ID NO: 76 | SEQ ID NO: 108 |
| B35 | SEQ ID NO: 45 | SEQ ID NO: 77 | SEQ ID NO: 109 |
| C1 | SEQ ID NO: 46 | SEQ ID NO: 78 | SEQ ID NQ: 110 |
| C2 | SEQ ID NO: 47 | SEQ ID NO: 79 | SEQ ID NO: 111 |
| C5 | SEQ ID NO: 48 | SEQ ID NO: 80 | SEQ ID NO: 112 |
| C6 | SEQ ID NO: 49 | SEQ ID NO: 81 | SEQ ID NO: 113 |
| D8 | SEQ ID NO: 50 | SEQ ID NO: 82 | SEQ ID NO: 114 |
| D9 | SEQ ID NO: 51 | SEQ ID NO: 83 | SEQ ID NO: 115 |
| D10 | SEQ ID NO: 52 | SEQ ID NO: 84 | SEQ ID NO: 116 |
| D13 | SEQ ID NO: 53 | SEQ ID NO: 85 | SEQ ID NO: 117 |
| D17 | SEQ ID NO: 54 | SEQ ID NO: 86 | SEQ ID NO: 118 |
| D20 | SEQ ID NO: 55 | SEQ ID NO: 87 | SEQ ID NO: 119 |
| D24 | SEQ ID NO: 56 | SEQ ID NO: 88 | SEQ ID NO: 120 |
| D25 | SEQ ID NO: 57 | SEQ ID NO: 89 | SEQ ID NO: 121 |
| D26 | SEQ ID NO: 58 | SEQ ID NO: 90 | SEQ ID NO: 122 |
| D27 | SEQ ID NO: 59 | SEQ ID NO: 91 | SEQ ID NO: 123 |
| D33 | SEQ ID NO: 60 | SEQ ID NO: 92 | SEQ ID NO: 124 |
| D37 | SEQ ID NO: 61 | SEQ ID NO: 93 | SEQ ID NO: 125 |
| D69 | SEQ ID NO: 62 | SEQ ID NO: 94 | SEQ ID NO: 126 |
| E4 | SEQ ID NO: 63 | SEQ ID NO: 95 | SEQ ID NO: 127 |
| G52 | SEQ ID NO: 64 | SEQ ID NO: 96 | SEQ ID NO: 128 |

### Late Transcription Units and Capsid Proteins

[0068] The late transcription units (L1-L5) encode structural proteins, which are responsible for virus tropism. The main structural proteins which form the viral capsid are hexon, penton base, and fiber. Fiber proteins protrude from the capsid surface and are primarily responsible for cell tropism, though other parts of the viral capsid (e.g. penton base) may contribute in some cases¹⁷. The fiber knob binds to receptors on the surface of certain cells in order to mediate cell attachment and the first step of cell entry. Penton base is involved in internalisation of virus particles via interaction with cellular integrins¹³. The hexon protein contains hypervariable regions (HVRs) which are serotype-specific and are therefore considered to be major immune determinants. Most neutralising antibodies against HAd5 bind to the hexon HVR sequences, and to a lesser extent the fiber knob¹⁴.

[0069] The capsid proteins are also responsible for the induction of host immune responses such as neutralising antibodies. Antigens at the surface of the virion are mainly type-specific¹³. Accordingly, constructing vectors or oncolytic viruses with one or more capsid proteins listed in Table 4 below may help to avoid the issues of pre-existing immunity encountered with HAdV5-based vectors and viruses, for example if the virus from which the capsid protein is derived has a lower seroprevalence in the human population than HAdV5. In addition to the capsid proteins in Table 4, SEQ ID NOs 1443, 1426 and 1431 correspond to the fiber, penton and hexon genes of the newly-cloned F41 adenovirus genome, respectively, and the invention similarly encompasses constructing vectors or oncolytic viruses with these sequences.

[0070] Where a vector includes the L1 region, this means that it comprises all of the open reading frames (ORFs) forming part of the L1 region, as well as any intervening sequences (coding or non-coding). The vector also includes any flanking sequence involved in expression of the L1 genes (e.g. starting from the upstream transcription start site). Analogous provisions apply to the L2, L3, L4 and L5 regions. ORFs from each of these regions, for each of the cloned viruses, are provided in Table 5.

TABLE 4
capsid proteins

| Adenovirus | Fiber | Penton | Hexon |
|---|---|---|---|
| A12 | SEQ ID NO: 129 | SEQ ID NO: 161 | SEQ ID NO: 189 |
| A18 | SEQ ID NO: 130 | SEQ ID NO: 162 | SEQ ID NO: 190 |
| A31 | SEQ ID NO: 131 | SEQ ID NO: 163 | SEQ ID NO: 191 |
| B3 | SEQ ID NO: 132 | SEQ ID NO: 164 | SEQ ID NO: 192 |
| B7 | SEQ ID NO: 133 | SEQ ID NO: 165 | SEQ ID NO: 193 |
| B16 | SEQ ID NO: 134 | SEQ ID NO: 166 | SEQ ID NO: 194 |
| B21 | SEQ ID NO: 135 | SEQ ID NO: 167 | SEQ ID NO: 195 |
| B50 | SEQ ID NO: 136 | SEQ ID NO: 168 | SEQ ID NO: 196 |
| B11 | SEQ ID NO: 137 | SEQ ID NO: 169 | SEQ ID NO: 197 |
| B14a | SEQ ID NO: 138 | SEQ ID NO: 170 | SEQ ID NO: 198 |
| B14b | SEQ ID NO: 139 | SEQ ID NO: 171 | SEQ ID NO: 199 |
| B34 | SEQ ID NO: 140 | SEQ ID NO: 172 | SEQ ID NO: 200 |
| B35 | SEQ ID NO: 141 | SEQ ID NO: 173 | SEQ ID NO: 201 |
| C1 | SEQ ID NO: 142 | SEQ ID NO: 174 | SEQ ID NO: 202 |
| C2 | SEQ ID NO: 143 | SEQ ID NO: 175 | SEQ ID NO: 203 |
| C5 | SEQ ID NO: 144 | — | SEQ ID NO: 204 |
| C6 | SEQ ID NO: 145 | — | SEQ ID NO: 205 |
| D8 | SEQ ID NO: 146 | SEQ ID NO: 176 | SEQ ID NO: 206 |
| D9 | SEQ ID NO: 147 | SEQ ID NO: 177 | SEQ ID NO: 207 |
| D10 | SEQ ID NO: 148 | SEQ ID NO: 178 | SEQ ID NO: 208 |
| D13 | SEQ ID NO: 149 | SEQ ID NO: 179 | SEQ ID NO: 209 |
| D17 | SEQ ID NO: 150 | SEQ ID NO: 180 | SEQ ID NO: 210 |
| D20 | SEQ ID NO: 151 | SEQ ID NO: 181 | SEQ ID NO: 211 |
| D24 | SEQ ID NO: 152 | SEQ ID NO: 182 | SEQ ID NO: 212 |
| D25 | SEQ ID NO: 153 | SEQ ID NO: 183 | SEQ ID NO: 213 |
| D26 | SEQ ID NO: 154 | SEQ ID NO: 184 | SEQ ID NO: 214 |
| D27 | SEQ ID NO: 155 | SEQ ID NO: 185 | SEQ ID NO: 215 |
| D33 | SEQ ID NO: 156 | SEQ ID NO: 186 | SEQ ID NO: 216 |
| D37 | SEQ ID NO: 157 | SEQ ID NO: 187 | SEQ ID NO: 217 |
| D69 | SEQ ID NO: 158 | SEQ ID NO: 188 | SEQ ID NO: 218 |
| E4 | SEQ ID NO: 159 | — | SEQ ID NO: 219 |
| G52 | SEQ ID NO: 160 | — | SEQ ID NO: 220 |

TABLE 5
ORFs in L1, L2, L3, L4 and L5 regions

| Adeno- | SEQ ID NOs | | | | |
|---|---|---|---|---|---|
| virus | L1 ORFs | L2 ORFs | L3 ORFs | L4 ORFs | L5 ORFs |
| A12 | 253-254 | 249-252 | 246-248 | 242-244 | 234 |
| A18 | 290-291 | 287-289 | 283-285 | 279-281 | 271 |
| A31 | 326-327 | 323-325 | 320-322 | 316-318 | 308 |
| B3 | 363-364 | 359-362 | 355-358 | 351-353 | 341 |
| B7 | 401-402 | 397-400 | 393-396 | 389-391 | 378 |
| B16 | 439-440 | 435-438 | 431-434 | 426-429 | 416 |
| B21 | 478-479 | 474-477 | 470-473 | 465-468 | 455 |
| B50 | 516-517 | 512-515 | 508-511 | 503-506 | 493 |
| B11 | 551, 553 | 548-550 | 545-547 | 541-543 | 531 |
| B14a | 587-588 | 583-586 | 580-582 | 576-578 | 571 |
| B14b | 627-628 | 623-626 | 620-622 | 616-618 | 606 |
| B34 | 664-665 | 661-663 | 658-660 | 654-656 | 644 |
| B35 | 701, 703 | 698-700 | 695-697 | 691-693 | 681 |
| C1 | 740-741 | 736, 738 | 733, 739 | 729, 734 | 720, 731 |
| C2 | 778-779 | 774-777 | 771-773 | 768-769 | 760 |
| C5 | 816-817 | 812, 814 | 809-810 | 805 | 796, 807 |
| C6 | — | 850, 852 | 847-848 | 842 | 834 |
| D8 | 885-886 | 881-884 | 878-880 | 874-876 | 870 |
| D9 | 923-924 | 919-922 | 916-918 | 911-914 | 901 |
| D10 | 959-960 | 955-958 | 952-954 | 948-950 | 938 |
| D13 | 997-999 | 993-996 | 990-992 | 986-988 | 975 |
| D17 | 1035-1036 | 1030-1034 | 1027-1029 | 1022-1025 | 1013 |
| D20 | 1069-1070 | 1066-1068 | 1063-1065 | 1059-1061 | 1049 |
| D24 | 1105-1106 | 1101-1104 | 1098-1100 | 1094-1096 | 1084 |
| D25 | 1143-1145 | 1139-1142 | 1136-1138 | 1131-1134 | 1120 |
| D26 | 1181-1182 | 1178-1180 | 1175-1177 | 1170-1173 | 1160 |
| D27 | 1219-1220 | 1216-1218 | 1213-1215 | 1208-1211 | 1197 |
| D33 | 1257-1258 | 1253-1256 | 1250-1252 | 1245-1248 | 1234 |
| D37 | 1294-1295 | 1291-1293 | 1288-1290 | 1283-1286 | 1273 |
| D69 | 1330, 1332 | 1326-1329 | 1323-1325 | 1318-1321 | 1308 |
| E4 | 1368-1369 | 1364-1367 | 1360-1363 | 1356-1358 | 1346 |
| G52 | — | — | 1394-1395 | — | 1381-1382 |
| F41 | — | 1429 | 1431-1432 | — | — |

### Cell Tropism

[0071] Most adenoviral vectors and oncolytic adenoviruses currently in use or development are based on HAdV5. One limitation of HAdV5-based vectors and viruses is the strong liver cell tropism of HAdV5 when administered intravenously.

[0072] The adenoviral genome sequences cloned by the present inventors provide a wide repertoire of sequences from which vectors and oncolytic viruses can be made, and many of these vectors and oncolytic viruses will have the advantage of a different cell tropism from HAdV5, based on the cell tropism of the virus from which the vector or oncolytic virus sequence is derived. If the vector or oncolytic virus is made as a hybrid of sequences from different viruses, its cell tropism will be determined by the tropism of the virus from which the capsid genes are derived (in particular the fiber shaft and knob).

[0073] For example, human adenovirus type 17 (HAdV17) shows endothelial cell tropism (see Example 3). Species B viruses demonstrate high transduction efficiencies in epithelial (HeLa and A549 cells) and endothelial cells, while Ad5 still displays the highest transduction rates in other human and murine cell types (hepatocytes, lymphocytes, neuroblastoma cells and myoblasts). Exploring natural adenovirus diversity revealed distinct tropisms in vivo (Example 1; FIG. 2)

[0074] Table 6 summarises the cell and/or tissue tropism of the cloned adenoviruses, any known cellular receptors for the cloned adenoviruses, and the types of infection caused by these adenoviruses. The tissue tropism and type of infection caused provide some guidance as to the likely cell tropism.

[0075] Table 6 also lists some possible therapeutic uses of vectors or oncolytic viruses derived from these adenoviral genomes, based on their tropism.

TABLE 6
tropism
Information adapted from references 15 and 16 (incorporated herein by reference).

| | Cell | | Tissue | | Possible therapeutic |
|---|---|---|---|---|---|
| Ad | tropism | Receptors | tropism | Type of infection | uses |
| A12 | | | Intestine | Gastrointestinal, | |
| | | | | respiratory, urinary | |
| A18 | | | Intestine | Gastrointestinal, | |
| | | | | respiratory, urinary | |
| A31 | | | Intestine | Gastrointestinal, | |
| | | | | respiratory, urinary | |
| B3 | Epithelial/ | DSG-2¹⁷ | Tonsils/ | Keratoconjunctivitis, | Epithelial tumours |
| | endothelial | | respiratory | gastrointestinal, | |
| | | | tract | respiratory, urinary | |
| B16 | Epithelial/ | CD46¹⁸ | Tonsils/ | Keratoconjunctivitis, | |
| | endothelial | | respiratory | gastrointestinal, | |
| | | | tract | respiratory, urinary | |
| B21 | Epithelial/ | CD46¹⁸ | Tonsils/ | Keratoconjunctivitis, | |
| | endothelial | | respiratory | gastrointestinal, | |
| | | | tract | respiratory, urinary | |
| B50 | Epithelial/ | CD46¹⁸ | Tonsils/ | Keratoconjunctivitis, | |
| | endothelial | | respiratory | gastrointestinal, | |
| | | | tract | respiratory, urinary | |
| B11 | Epithelial/ | CD46 | Hematopoietic | Gastrointestinal, | Epithelial tumours |
| | endothelial | DSG-2¹⁷ | cells, kidney, | respiratory, urinary | |
| | | | urinary bladder | | |
| B14 | Epithelial/ | DSG-2¹⁷ | Hematopoietic | Gastrointestinal, | Epithelial tumours |
| | endothelial | | cells, kidney, | respiratory, urinary | |
| | | | urinary bladder | | |
| B34 | Epithelial/ | | Hematopoietic | Gastrointestinal, | |
| | endothelial | | cells, kidney, | respiratory, urinary | |
| | | | urinary bladder | | |
| B35 | Epithelial/ | CD46¹⁸ | Hematopoietic | Gastrointestinal, | |
| | endothelial | | cells, kidney, | respiratory, urinary | |
| | | | urinary bladder | | |
| C1 | | | Respiratory | Respiratory, | |
| | | | tract | gastrointestinal | |
| | | | | including hepatitis, | |
| | | | | urinary | |
| C5 | | | Respiratory | Respiratory, | |
| | | | tract (liver in | gastrointestinal | |
| | | | mice) | including hepatitis, | |
| | | | | urinary | |
| C6 | | | Respiratory | Respiratory, | |
| | | | tract | gastrointestinal | |
| | | | | including hepatitis, | |
| | | | | urinary | |
| D8 | | | Eye | Keratoconjunctivitis, | |
| | | | | gastrointestinal | |
| D9 | | | Eye | Keratoconjunctivitis, | |
| | | | | gastrointestinal | |
| D10 | | | Eye | Keratoconjunctivitis, | |
| | | | | gastrointestinal | |
| D13 | | | Eye | Keratoconjunctivitis, | |
| | | | | gastrointestinal | |
| D17 | Endothelial | hCAR | Eye | Keratoconjunctivitis, | Endothelial disease |
| | cells | CD46 | | gastrointestinal | or dysfunction, |
| | | | | | including coagulation |
| | | | | | disorders |
| D20 | | | Eye | Keratoconjunctivitis, | |
| | | | | gastrointestinal | |
| D24 | | | Eye | Keratoconjunctivitis, | |
| | | | | gastrointestinal | |
| D25 | | | Eye | Keratoconjunctivitis, | |
| | | | | gastrointestinal | |
| D26 | | | Eye | Keratoconjunctivitis, | |
| | | | | gastrointestinal | |
| D27 | | | Eye | Keratoconjunctivitis, | |
| | | | | gastrointestinal | |
| D33 | | | Eye | Keratoconjunctivitis, | |
| | | | | gastrointestinal | |
| D37 | | | Eye | Keratoconjunctivitis, | |
| | | | | gastrointestinal | |
| D69 | | | Eye | Keratoconjunctivitis, | |
| | | | | gastrointestinal | |
| E4 | | | Respiratory | Keratoconjunctivitis, | |
| | | | tract, eye | respiratory | |

hCAR: human coxsackievirus and adenovirus receptor
DSG-2: desmoglein 2 is a calcium-binding transmembrane glycoprotein and forms part of the cadherin protein family. DSG-2 is a component of the cell-cell adhesion structure in epithelial cells, and is overexpressed in various epithelial cancers, including gastric cancer, squamous cell carcinomas, melanoma, metastatic prostate cancer and bladder cancer¹⁷.

[0076] Accordingly, the invention provides a method of infecting a cell with an adenoviral vector according to the invention wherein the cell is an epithelial cell or an endothelial cell. Also provided is a method of infecting a tissue with an adenoviral vector according to the invention wherein the tissue is selected from the intestine, tonsils, respiratory tract, hematopoietic cells, kidney, urinary bladder and eye. In some embodiments, the invention provides a method for treating one or more diseases recited in Table 4, for example, wherein the treatment comprises infecting the corresponding cell and/or tissue as recited in Table 4. For example, the invention provides a method of treating epithelial tumours comprising administering an adenoviral vector of the invention. Similarly, the invention provides a method of treating endothelial disease or dysfunction, for example a coagulation disorder, comprising administering an adenoviral vector of the invention. The invention further provides a method of treating a disease affecting the gastrointestinal, respiratory or urinary tract or the keratoconjunctiva or hepatitis infection comprising administering an adenoviral vector of the invention.

[0077] In some embodiments, the invention provides an oncolytic adenoviral vector, for use in treating osteosarcoma, wherein the oncolytic adenoviral vector is derived from the adenovirus B21. Similarly, the invention provides a method of treating osteosarcoma or glioblastoma comprising administering an oncolytic adenoviral vector derived from adenovirus B21 (B21 is the same as Ad21).

[0078] In other embodiments, the invention provides an oncolytic adenoviral vector, for use in treating lung carcinomas, wherein the oncolytic adenoviral vector is derived from the adenovirus B35 or D69. Similarly, the invention provides a method of treating a lung carcinoma comprising administering an oncolytic adenoviral vector derived from adenovirus B35 or D69.

[0079] Similarly, the invention provides a method of targeting human airway epithelial comprising administering an adenoviral vector derived from adenovirus B21, D37 or D69.

[0080] In some embodiments, the invention provides an adenoviral vector for use in infecting lung cells or tissue. In some embodiments, the adenoviral vector is derived from Ad21, Ad3, Ad37, or Ad69. In some embodiments, the adenoviral viral vector is for use in treating a disease of the lung, such as lung cancer or cystic fibrosis. Similarly, the invention provides a method of treating a disease of the lung comprising administering an adenoviral vector derived from adenovirus Ad21. In some embodiments, the adenoviral vector is oncolytic. In some embodiments the adenoviral vector comprises a transgene capable of treating the disease. In some embodiments, the adenoviral vector carries the CRISPR/Cas9 components and the treatment involves correcting the mutated gene sequence.

[0081] In one embodiment, the invention provides a method of transducing osteosarcoma cells or an osteosarcoma-derived cell line, comprising contacting the cells with a plasmid or adenoviral vector of the present invention, preferably wherein adenoviral sequences are derived from the adenovirus B21.

[0082] In another embodiment, the invention provides a method of transducing epithelial cells or an epithelial-derived cell line, comprising contacting the cells with a plasmid or adenoviral vector of the present invention, preferably wherein adenoviral sequences are derived from the adenovirus B3, B14, B16, B35 or B50.

[0083] In another embodiment, the invention provides a method of transducing endothelial cells or an endothelial-derived cell line, comprising contacting the cells with a plasmid or adenoviral vector of the present invention, preferably wherein adenoviral sequences are derived from the adenovirus B16 or B50.

[0084] In another embodiment, the invention provides a method of transducing breast cancer cells or a breast cancer-derived cell line, comprising contacting the cells with a plasmid or adenoviral vector of the present invention, preferably wherein adenoviral sequences are derived from the adenovirus D37. The invention also provides a method of treating breast cancer comprising administering an adenoviral vector derived from adenovirus D37. In some embodiments, the adenoviral vector is oncolytic. In some embodiments the adenoviral vector comprises a transgene capable of treating the disease.

[0085] In another embodiment, the invention provides a method of transducing liver cells or a liver-derived cell line, comprising contacting the cells with a plasmid or adenoviral vector of the present invention, preferably wherein adenoviral sequences are derived from the adenovirus C5, or B50.

[0086] In another embodiment, the invention provides a method of transducing lung cells or a lung-derived cell line, comprising contacting the cells with a plasmid or adenoviral vector of the present invention, preferably wherein adenoviral sequences are derived from the adenovirus Ad21, Ad37 or Ad69.

[0087] In one embodiment, the invention also provides adenoviral vectors of the invention for use in treating osteosarcoma, preferably wherein adenoviral sequences are derived from the adenovirus B21.

[0088] The invention provides a method of screening for cell tropisms, which comprises:
[0089] a) contacting a cell with an adenoviral vector as described herein; and
[0090] b) determining whether the vector infects the cell.

[0091] Similarly, the invention provides a method of screening for cell tropisms, which comprises:
[0092] a) contacting a cell with an adenoviral vector from a library of two or more adenoviral vectors as described herein;
[0093] b) determining whether the vector infects the cell; and
[0094] c) repeating steps a) and b) for at least one more member of the library (e.g. for at least 2, 3, 4, 5, 6, 7 or more) or each member of the library; and
[0095] d) optionally repeating steps a) to c) using a different cell type.

[0096] Advantageously, the vector may comprise a reporter gene which is a fluorescent protein or luciferase, and step b) may comprise determining whether the cell fluoresces or glows as a result of expression of the fluorescent protein or the luciferase. For example, step b) may comprise adding a luciferase substrate, such as furimazine or luciferin, and measuring the luminescence units.

[0097] In some embodiments, the method of screening for cell tropisms is carried out in vitro. In some embodiments, the method of screening for cell tropisms is carried out in vivo and comprises analysing the biodistribution as detected by transgene expression levels and/or viral genome level. For example, an in vivo method may be carried out in a mouse, rat, rabbit or guinea pig.

[0098] The invention further provides a method of screening for cell tropisms, which comprises:
[0099] a) contacting a cell with an adenoviral vector as described herein; and
[0100] b) determining whether the vector lyses the cell.

[0101] Similarly, the invention provides a method of screening for cell tropisms, which comprises:
[0102] a) contacting a cell with an adenoviral vector from a library of two or more adenoviral vectors as described herein;
[0103] b) determining whether the vector lyses the cell; and
[0104] c) repeating steps a) and b) for at least one more member of the library (e.g. for at least 2, 3, 4, 5, 6, 7 or more) or each member of the library; and
[0105] d) optionally repeating steps a) to c) using a different cell type.

[0106] In some embodiments, the step of determining whether the vector lyses the cells comprises staining the cells with crystal violet or methylene blue.

[0107] Advantageously, use of a method of screening for cell tropisms as described herein allows identification of a virus candidate for disease specific targeting. This allows development of novel therapeutic agents by carrying out further steps of modifying the virus using the methods described herein, e.g. so that it contains a transgene. Accordingly, the invention also provides a virus candidate for disease specific targeting identified by or identifiable by the method of screening for cell tropisms as described herein. Accordingly, the invention provides a method of treatment of a disease that affects a cell type comprising administering an adenoviral vector as described herein which has been identified (or can be identified) as infecting that cell type by a method of screening for cell tropisms as described herein, wherein the vector has been modified to incorporate one or more transgenes useful for treating the disease and/or wherein the vector is oncolytic for the cell type. In some embodiments, the one or more transgenes comprise a therapeutic agent. In some embodiments, the one or more transgenes is the CRISPR/Cas9 system.

[0108] The invention also provides a method of targeting a cell by contacting the cell with an adenoviral vector as described herein, wherein the type of cell has been identified (or can be identified) as a type of cell that is infected by the adenoviral vector using a method of screening for cell tropisms as described herein. In some embodiments, the vector has been modified to incorporate one or more transgenes. In some embodiments, the vector is oncolytic for the cell type. Thus, the method of targeting described herein provides a means to deliver a transgene of interest to a cell.

### Early Transcription Units

[0109] The early transcription units are E1, E2, E3 and E4. E1, E2 and E4 are majorly involved in the replication cycle of adenoviruses.

[0110] The E1 transcription unit comprises E1A and E1B, and is the main unit responsible for initiating replication after cellular infection. E1A activates transcription of a number of viral genes as well as host cell genes. The protein coding genes of E1B have various functions, for instance suppressing apoptosis. The E1 region can be deleted in the vectors of the invention to make them replication deficient and consequently safer for use in therapy. Deletion of the E1 region (and optionally also other regions of the viral genome) also provides space to accommodate transgenes.

[0111] The E2 transcription unit encodes the DNA polymerase (Pol), the terminal protein (TP), and the DNA-binding protein (DBP) which are involved in replication and amplification of adenoviral DNA.

[0112] Products of the E4 transcription unit are involved in transcription, apoptosis, cell cycle control, DNA repair, cell signalling and posttranslational modifications.

[0113] The E3 transcription unit exhibits immunomodulatory functions: it protects cells from killing mediated by cytotoxic T cells and death-inducing cytokines, and can prevent apoptosis. This region varies significantly between the different adenovirus serotypes and can contain a different number of protein-coding genes.

[0114] Table 7 lists the open reading frames (ORFs) in the each of the early transcription units, for each of the cloned adenoviral genomes.

[0115] When reference is made to deletion of the E1 region, this means that minimally all the ORFs listed in Table 7 as forming part of the E1 region are deleted, and preferably also any intervening sequence, e.g. non-coding sequence or any further coding sequence. Some flanking sequence may also be deleted (e.g. the transcription start site).

[0116] Similarly, when reference is made to deletion of the E3 region, this means that minimally all the ORFs listed in Table 7 as forming part of the E3 region are deleted, and preferably also any intervening sequence, e.g. non-coding sequence or any further coding sequence. Some flanking sequence may also be deleted (e.g. the transcription start site).

[0117] Where a vector includes the E1 region, this means that it comprises all of the ORFs listed in Table 7 as forming part of the E1 region, including any intervening sequences (coding or non-coding). The vector also includes any flanking sequence involved in expression of the E1 genes (e.g. starting from the upstream transcription start site). Analogous provisions apply to the E2, E3 and E4 regions.

TABLE 7
ORFs in E1, E2, E3 and E4 regions

| Adeno- | SEQ ID NOs | | | |
|---|---|---|---|---|
| virus | E1 ORFs | E2 ORFs | E3 ORFs | E4 ORFs |
| A12 | 260-262 | 245, 256-257 | 236-241 | 229-233 |
| A18 | 296-299 | 282, 292-293 | 273-278 | 265-270 |
| A31 | 332-333 | 319, 329 | 310-315 | 302-307 |
| B3 | 369-372 | 354, 365-366 | 343-350 | 336-340 |
| B7 | 407-410 | 392, 403-404 | 380-388 | 373-377 |
| B16 | 445-449 | 430, 441-442 | 418-425 | 411-415 |
| B21 | 484-487 | 469, 480-481 | 457-464 | 450-454 |
| B50 | 522-525 | 507, 518-519 | 495-502 | 488-492 |
| B11 | 557-563 | 544, 552, 554-556 | 533-540 | 526-530 |
| B14a | 593-599 | 579, 589-590 | 573-575 | 566-570 |
| B14b | 633-637 | 619, 629-630 | 608-615 | 601-605 |
| B34 | 670-673 | 657, 666-668 | 646-653 | 639-643 |
| B35 | 707-711 | 694, 702, 704-706 | 683-690 | 676-680 |
| C1 | 749-752 | 730, 732, 743-745 | 721-728 | 714-718 |
| C2 | 785-788 | 770, 780, 782 | 761-767 | 754-758 |
| C5 | 823-826 | 806, 808, 818, 820 | 797-804 | 790-794 |
| C6 | 861-864 | 858 | 835-838, | 828-832 |
| | | | 840-841 | |
| D8 | 891-894 | 877, 888 | 872-873 | 865-869 |
| D9 | 929-931 | 915, 926 | 903-910 | 896-900 |
| D10 | 965-967 | 951, 962 | 940-947 | 933-937 |
| D13 | 1004-1007 | 989, 1001 | 977-985 | 969-974 |
| D17 | 1041-1043 | 1026, 1038 | 1015-1021 | 1008-1012 |
| D20 | 1075-1077 | 1062, 1072 | 1051-1058 | 1044-1048 |
| D24 | 1111-1113 | 1097, 1108 | 1086-1093 | 1079-1083 |
| D25 | 1150-1153 | 1135, 1147 | 1122-1130 | 1114-1119 |
| D26 | 1188-1190 | 1174, 1185 | 1162-1169 | 1154-1159 |
| D27 | 1225-1227 | 1212, 1222 | 1199-1207 | 1192-1196 |
| D33 | 1263-1265 | 1249, 1260 | 1236-1244 | 1229-1233 |
| D37 | 1300-1302 | 1287, 1296, 1297 | 1275-1282 | 1266-1272 |
| D69 | 1337-1339 | 1322, 1334 | 1310-1317 | 1303-1307 |
| E4 | 1374-1375 | 1359, 1370-1371 | 1348-1355 | 1340-1345 |
| G52 | 1407-1410 | — | 1384-1388 | 1376-1380 |
| F41 | 1416-1418 | 1421, 1423, — | 1436-1440- | 1444-1447- |

### Adenoviral Vectors

[0118] Adenoviral vectors may be replication-deficient (RD) or replication-competent (RC). Vectors have certain regions of the adenoviral genome deleted to provide space for foreign DNA (e.g. transgenes). Replication-deficient adenoviral vectors are formed by deletion of the E1 region (which comprises the DA and E1B essential early genes) in the adenoviral genome, which ensures complete inhibition of viral replication in cells. Amplification of replication-deficient adenoviral vectors containing DNA of non-viral origin is feasible if essential viral components are provided in the helper cell in trans. This can be accomplished by generation of stable cell lines which complement for the lacking genes (see below).

[0119] Replication-competent adenoviral vectors usually lack the E3 region, as the E3 genes are not essential for Ad replication in cell culture or in vivo. Further details regarding RD and RC vectors may be found in reference 25, which is incorporated herein by reference.

[0120] As noted above, adenoviral cell and tissue tropism is determined primarily by the fiber capsid protein, in particular the stalk and knob regions of this protein. Other viral capsid proteins may also contribute to cell entry.

[0121] Accordingly, in one embodiment, the invention provides an adenoviral vector comprising a fiber gene selected from SEQ ID NOs:130-131, 135, 138-140, 142, 145-146, 149, 151, 153, 155 and 158-160, or a sequence at least 70% identical thereto.

[0122] Preferably, the sequence is at least 80%, 85%, 90%, 95%, 96%, 97%, 98%, 99%, 99.5% or 99.9% identical to a sequence selected from SEQ ID NOs:130-131, 135, 138-140, 142, 145-146, 149, 151, 153, 155 and 158-160.

[0123] The vector may further comprise a penton gene selected from SEQ ID NOs: 161-175 and 177-192, or a sequence at least 70% identical thereto. Preferably, the sequence is at least 80%, 85%, 90%, 95%, 96%, 97%, 98%, 99%, 99.5% or 99.9% identical to a sequence selected from SEQ ID NOs: 161-175 and 177-192.

[0124] The vector may further comprise a hexon gene selected from SEQ ID NOs:193-207 and 209-224, or a sequence at least 70% identical thereto. Preferably, the sequence is at least 80%, 85%, 90%, 95%, 96%, 97%, 98%, 99%, 99.5% or 99.9% identical to a sequence selected from SEQ ID NOs: 193-207 and 209-224.

[0125] The fiber, penton and hexon genes are preferably all derived from the same viral serotype (see Table 4).

[0126] Hybrid vectors may be constructed, comprising a fiber gene selected from SEQ ID NOs: 130-131, 135, 138-140, 142, 145-146, 149, 151, 153, 155 and 158-160 or a sequence at least 70% identical thereto, but comprising further viral sequences (coding and/or non-coding) from a different adenoviral serotype. The further viral sequences are from another adenoviral serotype forming part of the new library disclosed herein (selected from SEQ ID NOs:1-15 and 17-32), and preferably are not from human adenovirus 5 (Accession No. M73260). Adenoviral non-coding and coding sequences that can be incorporated into different types of vectors of the invention are discussed in further detail below.

[0127] This embodiment of the invention may be combined with any of the viral vector types described herein, including first generation vectors, including vaccine vectors. The vector according to this embodiment may also be a helper vector.

### First Generation Adenoviral Vectors

[0128] The E1 region and/or the E3 region is deleted in first generation vectors of the invention. Deletion of such regions (and optionally also other regions of the viral genome) provides space to accommodate transgenes. Deletion of the E1 region makes the vectors replication deficient and consequently safer for use in therapy. Since the E1 gene products are required for viral growth, they are provided in trans in specific cell lines to allow production and amplification of the vectors. Vectors in which only the E3 region is deleted are replication competent.

[0129] Therefore, in one embodiment, the invention provides an adenoviral vector comprising a sequence selected from SEQ ID NOs:1-3, 5-8, 10-12, 14-15, 17-25 and 27-32, or a sequence at least 50% identical thereto, that lacks the E1 region.

[0130] Preferably, the sequence is at least 60%, 70%, 80%, 85%, 90%, 95%, 96%, 97%, 98%, 99%, 99.5% or 99.9% identical to a sequence selected from SEQ ID NOs:1-3, 5-8, 10-12, 14-15, 17-25 and 27-32.

[0131] In another embodiment, the invention provides an adenoviral vector comprising a sequence selected from SEQ ID NOs:1-8, 10-12, 14-15 and 17-32, or a sequence at least 50% identical thereto, that lacks the E1 region and the E3 region.

[0132] Preferably, the sequence is at least 60%, 70%, 80%, 85%, 90%, 95%, 96%, 97%, 98%, 99%, 99.5% or 99.9% identical to a sequence selected from SEQ ID NOs:1-8, 10-12, 14-15 and 17-32.

[0133] In a further embodiment, the invention provides an adenoviral vector comprising a sequence selected from SEQ ID NOs:1-3, 5-12, 14-15 and 17-32, or a sequence at least 50% identical thereto, that lacks the E3 region.

[0134] Preferably, the sequence is at least 60%, 70%, 80%, 85%, 90%, 95%, 96%, 97%, 98%, 99%, 99.5% or 99.9% identical to a sequence selected from SEQ ID NOs:1-3, 5-12, 14-15 and 17-32.

[0135] Hybrid vectors with a fiber protein from a different serotype can be constructed, as described above. Accordingly, the first-generation vectors may have the fiber gene replaced with a fiber gene from a different adenoviral serotype, selected from SEQ ID NOs:129-143 and 145-160, or a sequence at least 70% identical thereto (preferably at least 80%, 85%, 90%, 95%, 96%, 97%, 98%, 99%, 99.5% or 99.9% identical).

[0136] E1-deleted vectors can accept DNA insertions of up to around 5.1 kb. Vectors lacking both the E1 and the E3 regions can accommodate up to around 8.2 kb of foreign DNA¹⁹. Accordingly, a transgene (or one or more transgenes) inserted into the first generation adenoviral vectors of the invention may be up to around 5.1 kb in size in total if E1 is deleted, or up to around 8.2 kb in size in total if E1 and E3 are deleted.

[0137] It may be beneficial to retain the E3 region in some cases, as the E3 gene products include proteins which facilitate release of virus particles from cells and reduce cytotoxic T cell responses against cells transduced with the vector.

[0138] The above vectors can be used, for example, as helper vectors, oncolytic vectors, or vaccine vectors. Helper vectors should be replication deficient. Oncolytic vectors are replication competent. Vaccine vectors may be replication deficient, but are preferably replication competent as this may lead to the induction of better immune responses.

### High-Capacity Adenoviral Vectors

[0139] High-capacity adenoviral vectors lack all viral coding sequences. The benefit of such vectors is that they can accommodate much larger transgenes, or multiple transgenes, than the first generation vectors in which only some coding sequences are deleted.

[0140] The only required sequences from the viral genome are cis-acting elements located at both ends of the adenoviral DNA molecule, which should include the packaging signal (iv) located at the 5′ end of the genome, and the inverted terminal repeats (ITRs) at both ends of the adenoviral genome. For the commonly used adenovirus type 5 the ITR is 103 bp in length and the packaging/enhancer sequences span nucleotides 194-458 bp located at the left arm of the adenoviral genome. In general, 500 bp at the 5′ end of the genome will comprise the 5′ ITR and the packaging signal, and 150 bp at the 3′ end of the genome will comprise the 3′ ITR.

[0141] Since high-capacity adenoviral vectors lack all viral coding regions, they are constructed and propagated in conjunction with an adenoviral helper vector, which provides the necessary viral functions (early and late proteins necessary for replication) in trans (see below). The high-capacity vectors can be separated from the helper vectors, for example by ultracentrifugation on cesium chloride density gradients and/or anion exchange and size exclusion chromatography.

[0142] High-capacity adenoviral vectors can accommodate up to around 37 kb of foreign genetic material (e.g. one large transgene, or more than one transgene), and they are therefore useful for carrying large transgenes or multiple transgenes (e.g. 2, 3, 4, 5 or more transgenes) and/or other heterologous DNA sequences.

[0143] Therefore, in one embodiment, the invention provides an adenoviral vector comprising a sequence selected from the sequences contained within SEQ ID NO: 1-13 and 18-32 at the positions defined in Table 1, column 4 or a sequence at least 80% identical thereto, at the 5′ end, and the positions defined in Table 1, column 5, or a sequence at least 80% identical thereto, at the 3′ end.

[0144] Preferably, the sequences are at least 85%, 90%, 95%, 96%, 97%, 98%, 99%, 99.5% or 99.9% identical to the sequences contained within SEQ ID NO: 1-13 and 18-32 at the positions defined in Table 1, column 4, and the positions defined in Table 1, column 5.

[0145] In one embodiment, the invention provides an adenoviral vector comprising a sequence selected from SEQ ID NOs:33-45 and 50-64, or a sequence at least 80% identical thereto, at the 5′ end, and a sequence selected from SEQ ID NOs:97-109 and 114-128, or a sequence at least 80% identical thereto, at the 3′ end.

[0146] Preferably, the sequences are at least 85%, 90%, 95%, 96%, 97%, 98%, 99%, 99.5% or 99.9% identical to SEQ ID NOs:33-45, 50-64, 97-109 and 114-128.

### HCAdV Applications—CRISPR/Cas9

[0147] Advantageously, gene deleted high-capacity adenoviral vectors (HCAdVs) of the invention may offer the ability to delivery one or more large genes to a cell of interest. For example, in some embodiments, a gene-deleted high-capacity adenoviral vector has a packing capacity of at least 15 kb, e.g. at least 20, 25, 30, 35, 40 or 45 kb. For example, in some embodiments, the gene-deleted high-capacity adenoviral vector comprises at least 15 kb, e.g. at least 20, 25, 30, 35, 40 or 45 kb, of DNA which is non-adenoviral genome sequence. The high-capacity adenoviral vectors of the invention may be used to deliver the components of the CRISPR/Cas9 system. The advantage of using the high-capacity adenovirus vectors for this purpose is that a single viral vector can be used, optionally with multiple guide RNAs. They may also be used to deliver transcription activator-like effector nucleases (TALENs) or zinc-finger nucleases (ZFNs). A useful application of these vectors is in vivo gene correction to treat genetic diseases. After cutting of the affected target locus in the host genome and in the presence of a respective donor DNA (which can be delivered by an adenoviral vector or an adeno-associated viral (AAV) vector), the mutated gene can be repaired by homology-directed DNA repair. In addition, such vectors can be used to treat infectious disease, for example as an antiviral approach to cut and destroy viral genomes. The invention provides these uses accordingly.

[0148] The clustered regularly interspaced short palindromic repeats (CRISPR)/Cas9 system allows for straightforward in vivo genome editing. Nevertheless, viral delivery of all required components including Cas9 and one or more guide RNA (gRNA) expression units using one single viral vector has not been fully exploited. Gene deleted high-capacity adenoviral vectors (HCAdVs) can efficiently deliver all expression units of the complete CRISPR/Cas9 machinery, including multiple gRNAs, into a broad variety of target cells using a single viral vector. However, the complicated handling of large DNA constructs and the time consuming production procedure hampered the use of HCAdV to deliver the CRISPR/Cas9 machinery for genome editing approaches. The present inventors have provided a toolbox for HCAdV genome manipulation for the fast and simple introduction of the customized CRISPR/Cas9 machinery to provide new instruments to improve somatic genome editing approaches in mammalian cells.

[0149] The inventors generated a new CRISPR/Cas9 shuttle plasmid toolbox containing the Cas9 nuclease gene, either utilising a constitutive or an inducible promoter, and a gRNA expression unit enabling customisation of the CRISPR/Cas9 for a desired target sequence. This allows cloning or recombining of all CRISPR/Cas9 components into the HCAdV genome in one step. To use several gRNA expression units for multiplexing the CRISPR/Cas9 system, further gRNA expression units can be easily included. Insertion of the CRISPR/Cas9 machinery can be either performed by recombineering²⁰ or conventional cloning. Further details regarding the CRISPR/Cas9 system, including the Cas9 gene and design of gRNAs, can be found in reference 21 (incorporated herein by reference).

[0150] Therefore, in one embodiment, the invention provides a plasmid which shares at least two regions of sequence homology with an adenoviral sequence of interest and which comprises the Cas9 gene and a guide RNA expression unit. In some embodiments, the Cas9 gene is under control of a constitutive promoter. In some embodiments, the Cas9 gene is under control of an inducible promoter. The regions of sequence homology may be designed to allow the Cas9 gene to be inserted into a chosen location in the adenoviral sequence. For example, in some embodiments, the at least two regions of sequence homology are designed so that the Cas9 gene and the gRNA expression unit are inserted into the E3 region of the adenoviral sequence. In some embodiments, the plasmid is the pAdV-FTC plasmid. Such a plasmid may be used in the methods of inserting one or more transgenes described herein as the second nucleic acid molecule.

[0151] Therefore, in one embodiment, the invention provides an adenoviral vector comprising a sequence selected from the sequences contained within SEQ ID NO: 1-13 and 18-32 at the positions defined in Table 1, column 4 or a sequence at least 80% identical thereto, at the 5′ end, and the positions defined in Table 1, column 5, or a sequence at least 80% identical thereto, at the 3′ end, and further comprising a Cas9 gene and at least one guide RNA. Preferably, the degree of sequence identity is at least 85%, 90%, 95%, 96%, 97%, 98%, 99%, 99.5% or 99.9%.

[0152] In one embodiment, the invention provides an adenoviral vector comprising a sequence selected from SEQ ID NOs:33-45 and 50-64, or a sequence at least 80% identical thereto, at the 5′ end, and a sequence selected from SEQ ID NOs:97-109 and 114-128, or a sequence at least 80% identical thereto, at the 3′ end, and further comprising a Cas9 gene and at least one guide RNA.

[0153] Preferably, the degree of sequence identity is at least 85%, 90%, 95%, 96%, 97%, 98%, 99%, 99.5% or 99.9%.

[0154] The vector may comprise more than one guide RNA, for example two, three, four, five, eight, 10, 15, 20, 25, 30, 40, 50 or more guide RNAs.

[0155] The Cas9 gene may be expressed under the control of a constitutive or an inducible promoter.

[0156] In one embodiment, the invention provides an adenoviral vector as described herein, further comprising a gene encoding a transcription activator-like effector nuclease (TALEN) or a zinc-finger nuclease.

[0157] In some embodiments, the adenoviral vectors disclosed herein comprise at least 1 kb of non-adenoviral sequence, e.g. at least 2, 5, 10, 15, 20, 25, 30, 35 or 40 kb non-adenoviral sequence. In some embodiments, the non-adenoviral sequence encodes one or more transgenes of interest. In some embodiments, the non-adenoviral sequence is not plasmid sequence.

### HCAdV Applications—Transposons

[0158] The high-capacity adenoviral vectors of the invention may be utilised in conjunction with the Sleeping Beauty transposon system, or other transposon systems such as PiggyBAC²², to facilitate stable modification of transduced target cells. Any cell type, including stem cells, can be modified by the adenovirus-Sleeping Beauty hybrid vector system²³.

[0159] Accordingly, in one embodiment, the invention provides an adenoviral vector comprising a sequence selected from the sequences contained within SEQ ID NO: 1-13 and 18-32 at the positions defined in Table 1, column 4 or a sequence at least 80% identical thereto, at the 5′ end, and the positions defined in Table 1, column 5, or a sequence at least 80% identical thereto, at the 3′ end, and further comprising a Sleeping Beauty transposase gene (SEQ ID NO:223) and a transgene flanked by the inverted repeats of the Sleeping Beauty transposon (SEQ ID NOs:224 and 225), or comprising a PIGGYBac transposase gene (SEQ ID NO:226) and a transgene flanked by the inverted repeats of the PIGGYBac transposon.

[0160] Preferably, the sequences are at least 85%, 90%, 95%, 96%, 97%, 98%, 99%, 99.5% or 99.9% identical to the sequences contained within SEQ ID NO: 1-13 and 18-32 at the positions defined in Table 1, column 4, and the positions defined in Table 1, column 5.

[0161] In one embodiment, the invention provides an adenoviral vector comprising a sequence selected from SEQ ID NOs:33-45 and 50-64, or a sequence at least 80% identical thereto, at the 5′ end, and a sequence selected from SEQ ID NOs:97-109 and 114-128, or a sequence at least 80% identical thereto, at the 3′ end, and further comprising a Sleeping Beauty transposase gene (SEQ ID NO:223) and a transgene flanked by the inverted repeats of the Sleeping Beauty transposon (SEQ ID NOs:224 and 225), or comprising a PIGGYBac transposase gene (SEQ ID NO:226) and a transgene flanked by the inverted repeats of the PIGGYBac transposon.

[0162] Preferably, the sequences are at least 85%, 90%, 95%, 96%, 97%, 98%, 99%, 99.5% or 99.9% identical to SEQ ID NOs:33-45, 50-64, 97-109 and 114-128.

[0163] In preferred embodiments, the transposase is expressed under the control of an inducible promoter. It is particularly preferred that this should be a cell-specific promoter, permitting expression of the transgene only in target cells of interest.

[0164] The adenovirus-Sleeping Beauty or adenovirus-PiggyBac hybrid vectors of the invention can be used to stably integrate transgenes into stem cells, e.g. hematopoietic stem cells. The main advantage of this strategy is that it avoids the sophisticated ex vivo transduction procedure usually required to transform hematopoietic stem cells. Instead, these stem cells can be directly transduced in vivo after mobilisation form the bone marrow and subsequent systemic administration of the hybrid vectors. Transgenes that can be stably integrated into these stem cells include those encoding coagulation factor VIII, coagulation factor IX, von Willebrand factor, haemoglobin, and other genes involved in genetic disorders derived from HSCs.

### Transgenes for Inclusion in Adenoviral Vectors

[0165] The adenoviral vectors of the invention may include any transgene (or more than one transgene). Transgenes with therapeutic utility are preferred.

[0166] Transgenes of particular interest in human gene therapy are listed below by way of example, but other transgenes may also be included in the adenoviral vectors of the invention.

[0167] Von Willebrand disease (VWD)—the large transgene encoding von Willebrand factor (vWF; Accession No. FLJ75522) cannot be delivered by e.g. adeno-associated virus vectors due to its size. The adenovirus vectors of the present invention can be used to achieve endothelial cell-specific vWF expression (endothelial cells are the natural producer cell type of vWF). For example, vectors based on HAdV D17, which have an endothelial cell tropism, can be used for endothelial cell-specific vWF expression.

[0168] Coagulation factor VIII (FVIII) deficiency/haemophilia A—the large transgene encoding FVIII (Accession No. NM_000132) can be delivered using the high-capacity adenoviral vectors of the invention. The transgene can be subsequently mobilised for somatic integration into the host genome using the high-capacity adenovirus/Sleeping Beauty hybrid vectors.

[0169] Beta-thalassemia—the haemoglobin gene (Accession No. NC_000023) can be included in the adenovirus vectors of the invention to treat the haemoglobin deficiency that causes beta-thalassemia.

[0170] Muscular dystrophy—Dystrophin gene (DMD) (Accession No. NC_000023).

[0171] Cystic fibrosis—cystic fibrosis (CF) gene (Accession No. NM_000492).

### Adenoviral Helper Vectors

[0172] Adenoviral helper vectors are used in conjunction with the high-capacity adenoviral vectors of the invention to facilitate their construction and propagation. The helper adenovirus provides all or most of the required early and late proteins necessary for replication.

[0173] Typically, the helper vector has loxP sites or FRT sites flanking the packaging signal such that packaging of the helper vector is avoided, resulting in preferential packaging of the high-capacity adenoviral genome.

[0174] In one embodiment, the invention provides an adenoviral helper vector comprising a sequence selected from SEQ ID NOs:1-13 and 18-32, or a sequence at least 50% identical thereto, that lacks the E1 region and comprises loxP sites (SEQ ID NO:221) or FRT sites (SEQ ID NO:222), wherein the loxP or FRT sites are positioned such that the first is downstream of the part of the sequence corresponding the positions defined in Table 1, column 3, respectively, and the second is upstream of the position of the deleted E1 region and downstream of the part of the sequence corresponding to the positions defined in Table 1, column 4, respectively.

[0175] In one embodiment, the invention provides an adenoviral helper vector comprising a sequence selected from SEQ ID NOs:1-13 and 18-32, or a sequence at least 50% identical thereto, that lacks the E1 region and comprises loxP sites (SEQ ID NO:221) or FRT sites (SEQ ID NO:222), wherein the loxP or FRT sites are positioned such that the first is downstream of the part of the sequence corresponding to SEQ ID NOs:65-77 and 82-96, respectively, and the second is upstream of the position of the deleted E1 region and downstream of the part of the sequence corresponding to SEQ ID NOs:33-45 and 50-64, respectively.

[0176] Preferably, the sequence is at least 60%, 70%, 80%, 85%, 90%, 95%, 96%, 97%, 98%, 99%, 99.5% or 99.9% identical to a sequence selected from SEQ ID NOs:1-13 and 18-32.

[0177] Hybrid helper vectors may be constructed as described above for the first-generation vectors of the invention.

### Adenoviral Vaccine Vectors

[0178] Adenoviral vectors can also be used as vaccine vectors to deliver and express transgenes from a pathogen to raise an immune response. Adenoviral vectors tend to induce strong humoral and especially strong T cell responses to the expressed antigen²⁵.

[0179] Adenoviral vaccine vectors can be replication-competent or replication-deficient. The immune response varies depending on the adenovirus serotype, and consequently the protection efficiency against the vaccine antigen may be improved using adenoviral vectors based on adenoviruses from the different serotypes forming part of the library disclosed herein²⁴.

[0180] Replication-competent adenovirus vectors have the E3 gene deleted and replaced by heterologous DNA. The antigen may be expressed as part of an antigen expression cassette (e.g. under the control of a constitutive or inducible promoter), or via a bicistronic IRES sequence or a P2A peptide in the context of an early or late adenovirus transcription unit. Preferably, an antigen expression cassette is inserted into the E3 region. This may be done, for example, using the strategy described in Example 1 for the GFP/luciferase tagged adenoviruses. Further information regarding adenovirus vectors for use in vaccination may be found in reference 25, which is incorporated herein by reference.

[0181] Accordingly, in one embodiment, the invention provides an adenoviral vaccine vector comprising a gene encoding and capable of expressing an antigen. The vaccine vector may be a first generation adenoviral vector as described above, or a high-capacity adenoviral vector as described above.

[0182] The antigen may be from any pathogen, but is preferably from human immunodeficiency virus (HIV), Ebolavirus, Zika virus, hepatitis B virus, hepatitis C virus, influenza virus, Mycobacterium tuberculosis, or Plasmodium falciparum.

[0183] Suitable HIV antigens include (but are not limited to) Gag, Pol and Nef²⁶. Suitable Ebolavirus antigens include the EBOV glycoprotein²⁷. Suitable Zika virus antigens include Zika virus glycoproteins. Suitable hepatitis B antigens include the surface antigen (HBsAg). Suitable hepatitis C antigens include N53-5B²⁸. Suitable influenza virus antigens include neuraminidase (NA), hemagglutinin (HA), nucleoprotein (NP) and matrix protein (MP).

### Producer Cell Lines

[0184] The adenovirus vectors and helper vectors of the invention may lack the E1 region. However, this region contains genes necessary for viral replication, and so E1-expressing cell lines are required in order to generate adenoviral particles for delivery of the vectors to cells.

[0185] Accordingly, in one embodiment, the invention provides a cell encoding, and capable of expressing, an adenoviral E1 region derived from SEQ ID NO:1-3, 5-8, 10-12, 14-15, 17-25 or 27-32, or a sequence at least 70% identical to said E1 region. Such cells are used for producing adenovirus vectors according to the invention.

[0186] Preferably, the sequence is at least 80%, 85%, 90%, 95%, 96%, 97%, 98%, 99%, 99.5% or 99.9% identical to the adenoviral E1 region derived from SEQ ID NO:1-3, 5-8, 10-12, 14-15, 17-25 or 27-32.

[0187] In some embodiments, the invention provides a eukaryotic cell that has been transfected with an adenovirus vector as described herein that has been released from the adenovirus plasmid by restriction enzyme digestion.

[0188] The cell may further be capable of expressing Cre recombinase (Accession No. P06956) or Flp recombinase (Accession No. P03870). This is useful when using a helper vector in which the packaging signal is flanked by loxP or FRT sites, respectively, to allow preferential packaging of the helper-dependent vector over the helper vector, as discussed above.

[0189] Preferred cell lines include HEK293, HeLa and A549, but other cells can also be used.

### Oncolytic Adenoviral Vectors

[0190] Oncolytic adenoviruses can be used in cancer therapy. Selective replication of these viruses in cancer cells can lead to killing of infected cells by virus-mediated cytolysis, and spreading to neighbouring tumour cells to continue the oncolytic process.

[0191] Oncolytic adenoviral vectors should be replication competent. That is, the oncolytic adenovirus should still be able to assemble and release new virus particles to infect neighbouring cells. Therefore it should contain at least all essential genes (transcription units E1, E2, E4 and L1-L5). E1 and E2, which are mainly responsible for virus replication, can be mutated or partially deleted to enhance replication efficiencies or to render the recombinant virus tumour-specific.

[0192] In one embodiment, the invention provides an oncolytic adenoviral vector comprising an E1 region derived from SEQ ID NOs:1-8, 10-12, 14-15, 18-25 or 27-32, or a sequence at least 70% identical to said E1 region. Preferably, the sequence is at least 80%, 85%, 90%, 95%, 96%, 97%, 98%, 99%, 99.5% or 99.9% identical to said E1 region.

[0193] Preferably, the oncolytic vector further comprises:
[0194] a) an E2 region derived from SEQ ID NOs:1-8, 10-12, 14-15, 18-25 or 27-32, or a sequence at least 70% identical to said E2 region;
[0195] b) an E4 region derived from SEQ ID NOs:1-8, 10-12, 14-15, 18-25 or 27-32, or a sequence at least 70% identical to said E4 region;
[0196] c) an L1 region derived from SEQ ID NOs:1-8, 10-12, 14-15, 18-25 or 27-32, or a sequence at least 70% identical to said L1 region;
[0197] d) an L2 region derived from SEQ ID NOs:1-8, 10-12, 14-15, 18-25 or 27-32, or a sequence at least 70% identical to said L2 region;
[0198] e) an L3 region derived from SEQ ID NOs:1-8, 10-12, 14-15, 18-25 or 27-32, or a sequence at least 70% identical to said L3 region;
[0199] f) an L4 region derived from SEQ ID NOs:1-8, 10-12, 14-15, 18-25 or 27-32, or a sequence at least 70% identical to said L4 region; and
[0200] g) an L5 region derived from SEQ ID NOs:1-8, 10-12, 14-15, 18-25 or 27-32, or a sequence at least 70% identical to said L5 region.

[0201] Preferably, the degree of sequence identity is at least 80%, 85%, 90%, 95%, 96%, 97%, 98%, 99%, 99.5% or 99.9%, for each of the regions.

[0202] The E1 and/or E2 region of the oncolytic vector may be mutated or partially deleted to enhance replication efficiency and/or tumour specificity (e.g. specificity of replication in tumour cells). For example, for achieving tumour cell specificity, a deletion may be made in the early gene E1B that inactivates p53. Suitable deletions have been made in HAd5-based vectors (ONYX-015 and H101); however, any deletion in E1B that has the effect of inactivating p53 may be used. Such viruses are useful in p53-functional cells. Alternatively, or in addition, oncolytic adenoviruses may contain a 24 bp deletion in the CR2 region of the DA region (as in AdΔ24). This mutation helps to restrict replication to cancer cells with mutated pRb (retinoblastoma protein). Further details of these and other mutations to enhance replication specificity can be found in reference 29 and the references cited therein (which are incorporated herein by reference).

[0203] Part or all or the E3 region may also be mutated or deleted to enhance antitumour effects. For example, deletion of the E3B gene enhances antitumour effects in immunocompetent mice³⁰.

[0204] The serotype from which viral sequences are derived may also be chosen to maximise replication. For example, vectors based on the hAd6 sequences disclosed herein appear to have enhanced oncolytic activity relative to human adenovirus 5 (see Example 6). Without being bound by any particular theory, it is thought that this enhanced oncolytic activity may be the result of enhanced replication. Vectors with enhanced replication or enhanced oncolytic activity relative to human adenovirus 5 are particularly preferred. The use of vectors comprising the Ad6 sequence in embodiments which comprise oncolysis is therefore encompassed by the present invention.

[0205] Besides directly genetically modifying adenoviral genes as discussed above, the virus can be armed using genes which enhance tumour cell killing or replication. Enhancing replication and production of new progeny is highly desirable, as in many cases virus-induced cell killing is not efficient enough.

[0206] The oncolytic vectors of the invention may further comprise:
[0207] a) a gene that enhances replication;
[0208] b) an immune-modulatory transgene;
[0209] c) a suicide gene or an interfering nucleic acid that enhances cell killing;
[0210] d) a gene or interfering nucleic acid that renders cells more sensitive to apoptosis or therapy with other drugs;
[0211] e) a tumour- or tissue-selective promoter; and/or
[0212] f) a gene for modulation of the tumour microenvironment.
   a) Genes that Enhance Replication

[0213] Replication can be enhanced by adding e.g. the P19 gene (Accession number: Q712F9) to oncolytic vectors of the invention³¹.

### b) Immune-Modulatory Transgenes

[0214] Immunostimulatory genes can recruit immune cells to tumours and activate them. Recruitment of the immune system helps to destroy the primary tumour as well as having the potential to act on and clear metastatic cells. Genes encoding cytokines such as monocyte chemotactic protein 3 (MCP3) or granulocyte-macrophage colony-stimulating factor (GM-CSF) can be included in the oncolytic vectors. Other cytokines also result in enhanced immune responses and antitumour toxicity, for example tumour necrosis factor alpha (TNFα) and interferon gamma (IFNγ). Various interleukins and heat shock proteins can also be used³³.

c) Suicide Genes and Interfering Nucleic Acids that Enhance Cell Killing

[0215] Genes which enhance cell killing allow greater efficacy, as viruses can more easily escape from infected cells and infect neighbouring tumour cells. “Suicide genes” that encode prodrug-converting enzymes that convert non-toxic prodrugs to toxic products, are particularly effective as the toxic products can lead to killing of neighbouring, non-infected cells. For example, the herpes simplex virus thymidine kinase gene (HSV-TK) can be used in combination with ganciclovir, and/or cytosine deaminase (CD) can be used in combination with 5′ fluorocytosine.

d) Genes or Interfering Nucleic Acids that Render Cells More Sensitive to Apoptosis or Therapy with Other Drugs

[0216] Genes that render cells more sensitive to apoptosis allow greater efficacy in killing of tumour cells. For example, human tumour suppressor genes such as p53, or viral genes which stimulate cell senescence such as the Ad death protein (E3-11.6K) may be incorporated into vectors of the invention. The Ad death protein also enhances viral spread. Other human genes that can be used include suppressor of cytokine signalling 3 (socs3), second mitochondria-derived activator of caspases (Smac), X-linked inhibitor of apoptosis protein (XIAP)-associated factor 1 (XAF1), antioxidant enzyme manganese superoxide dismutase (MnSOD), and TNF-related apoptosis-including ligand (TRAIL). Interfering nucleic acids against antiapoptotic proteins can also be used. For example, antisense RNAs against cellular checkpoint proteins (e.g. polo-like kinase 1 (plk1), checkpoint kinase 1 (chk1) and checkpoint kinase 2 (chk2)), or small interfering RNAs (siRNAs) against the oncogene K-ras have previously been used to enhance antitumour effects³³. Some of these genes and interfering nucleic acids result in induced synergistic oncolytic effects when combined with chemotherapeutic agents such as 5-fluorouracil and cisplatin³³.

### e) Tumour- or Tissue-Selective Promoters

[0217] Tumour or tissue-selective promoters allow further specificity of replication in tumour cells. For example, CN706 has a prostate-specific antigen promoter-driven E1 cassette, which allows selective, androgen-dependent replication in prostate cells³².

### f) Genes for Modulation of the Tumour Microenvironment

[0218] Tumours rely on processes such as angiogenesis and modulation of the extracellular matrix, and so disruption of these processes can have antitumour effects. Accordingly, the oncolytic vectors may carry transgenes that act on extracellular matrix components, such as tissue inhibitor of metalloproteinase 3 (TIMP3), or transgenes that inhibit angiogenesis, such as endostatin, Flt-1 (a VEGF inhibitor), or interfering RNAs targeted against angiogenesis-promoting factors such as VEGF.

[0219] The above transgenes may be placed under the control of endogenous viral gene control elements, or may be under the control of exogenous promoters. Exogenous promoters may be constitutive or inducible. Further details of suitable transgenes and promoters as discussed above can be found in references 29 and 33 and the references cited therein (which are incorporated by reference herein).

[0220] As noted above, the fiber gene region is primarily responsible for cell tropism. If the target tumour cells express a receptor to which a fiber protein from the adenoviral library binds, an oncolytic vector can be based on this adenoviral serotype, or a hybrid oncolytic vector may be constructed comprising only the fiber gene (or the shaft and knob regions thereof) from said adenoviral serotype, as described above for the first-generation vectors of the invention.

### Pharmaceutical Compositions

[0221] The invention also provides pharmaceutical compositions comprising the adenoviral vectors of the invention, including vectors for use in gene therapy, vaccine vectors and oncolytic vectors. The pharmaceutical compositions comprise the vector of the invention and a pharmaceutically-acceptable carrier.

[0222] The pharmaceutical compositions of the invention may comprise further excipients.

[0223] For example, a pharmaceutical composition comprising an oncolytic adenoviral vector of the invention may comprise a polymer or polyethylene glycol coating for the oncolytic vector. This may aid immune evasion and increase delivery to the tumour^{34,35}.

[0224] Compositions of the invention may comprise further therapeutic agents in addition to the adenoviral vector. For example, compositions comprising an oncolytic vector may comprise one or more further chemotherapeutic agents (e.g. 5-fluorouracil and cisplatin), particularly if the oncolytic vector increases susceptibility to therapy with other drugs.

### Methods of Treatment/Use in Therapy

[0225] The adenoviral vectors or the oncolytic adenoviruses of the invention may be used in therapy. The invention also provides a method of treatment comprising administering an adenoviral vector of the invention to a patient.

[0226] For example, adenoviral vectors of the invention may be used in gene therapy. Such vectors include a transgene, for example the transgenes discussed above for the treatment of von Willebrand disease, haemophilia A, beta thalassemia, muscular dystrophy and cystic fibrosis. However, the invention is not limited to treatment of these disorders, and in principle, the vectors of the invention can be used to treat any genetic disorder in which replacement of a mutant allele with a non-mutant copy could restore physiological function. Vectors for use in gene therapy include the first generation adenoviral vectors and the high-capacity adenoviral vectors described above. Where stable integration of transgenes would be beneficial, the adenovirus-Sleeping Beauty hybrid vectors of the invention can be used. The CRISPR/Cas9 high-capacity vectors can be used to facilitate in vivo gene correction to treat genetic diseases, as discussed above.

[0227] In addition, the CRISPR/Cas9 vectors of the invention can be used to treat infectious diseases, for example as an antiviral approach to cut and destroy viral genomes.

[0228] Adenoviral vaccine vectors of the invention can be used as prophylactic and/or therapeutic vaccines. Vaccine vectors can be used to protect against various diseases, for example including HIV, Ebola, Zika virus disease, hepatitis B, hepatitis C, influenza, tuberculosis or malaria.

[0229] Oncolytic vectors of the invention can be used to treat conditions involving the formation of benign and/or malignant tumours, including cancer. For example, the oncolytic vectors can be used to treat carcinoma (e.g. squamous cell or nasopharyngeal), colorectal cancer, hepatocellular carcinoma, lung cancer, mesothelioma, prostate cancer, breast cancer, ovarian cancer, bladder cancer, glioma etc.

[0230] The vectors of the invention may be administered locally or systemically. Systemic administration may include intravenous, intraarterial, intraperitoneal, intramuscular, intramuscular or subcutaneous administration. The vectors may be administered mucosally (e.g. orally or nasally). Local administration can include e.g. local delivery to target tissues for gene therapy (e.g. intrapleurally), or intratumoral or intracavitary delivery for oncolytic adenoviruses.

[0231] Vectors for use in therapy may be administered in conjunction with other therapeutic agents, either as part of the same composition, or as separate compositions administered together or sequentially. For example, treatment with an oncolytic vector may be administered in conjunction with other chemotherapeutic agents (e.g. 5-fluorouracil and cisplatin), or may be used in conjunction with e.g. radiotherapy.

[0232] Methods of diagnosis are also provided by the invention. Advantageously, a method for determining whether an adenovirus is present in a sample, as described herein, may be used for determining whether a disease is being caused by an adenoviral infection. Thus, the invention further provides a method for diagnosing a disease, e.g. an infection, as being caused by an adenovirus, comprising carrying out a method as described above, wherein the sample is a clinical sample from the patient (e.g. blood, saliva, urine or serum) or genomic DNA derived from the sample. In some embodiments the patient is selected from a human or non-human mammal, for example, horse, dog, cat, cow, goat, sheep, rabbit, mouse, rat or guinea pig. In some embodiments, the patient is a human. The invention further provides a method for determining the identity of an adenovirus in a patient sample by carrying out a method as described above. In some embodiments, the disease is selected from a disease of the respiratory tract, eye, intestine, urinary tract and nervous system. In some embodiments, the disease of the respiratory tract is a respiratory infection, for example, bronchiolitis, croup, or viral pneumonia. In some embodiments, the disease of the intestine is gastroenteritis or diarrhea. In some embodiments, the disease of the eye is conjunctivitis, pharyngoconjunctival fever, or keratoconjunctivitis. In some embodiments, the disease of the urinary tract is a urinary tract infection or hemorrhagic cystitis. In some embodiments, the disease is meningitis or encephalitis. In some embodiments the disease is febrile respiratory disease.

### Methods of Generating Adenoviral Vectors

[0233] The invention provides a method of generating an adenoviral vector or helper vector as defined above. This includes methods of producing the vaccine vectors or oncolytic vectors as defined above.

[0234] In one embodiment, a method of generating an adenoviral vector comprises cloning an adenoviral sequence using linear to linear homologous recombination (LLHR). In one embodiment, the invention provides a method for cloning an adenoviral sequence, comprising:
[0235] a) providing a sample comprising a first linear nucleic acid molecule which is an adenoviral genome;
[0236] b) providing a linearized plasmid which shares at least two regions of sequence homology with the first nucleic acid molecule; and
[0237] c) bringing the first nucleic acid molecule and the linearized plasmid into contact in the presence of a 5′ to 3′ exonuclease and an annealing protein such that the first linear nucleic acid and the linearized plasmid recombine to form a circular plasmid containing an adenoviral sequence.

[0238] In some embodiments, the adenoviral sequence is an adenoviral sequence as disclosed herein. In one embodiment the first linear nucleic acid molecule comprising an adenoviral sequence is present in a biological fluid obtained from a human or other non-human mammal. In some embodiments, the sample is blood, serum, spinal fluid, saliva and/or urine. In some embodiments, the sample is a mixture. In some embodiments, the sample is a clinical sample. This mixture may, in some embodiments, comprise adenoviral genomic DNA and eukaryotic genomic DNA, for example human genomic DNA. Advantageously the method of the present invention allows adenoviruses to be cloned directly from a biological sample without requiring a step of purifying the DNA before carrying out the cloning step. For example, instead of using a purified adenovirus genome, a DNA mixture isolated from cell/virus lysate can be used. In some embodiments, the method further comprises a step of amplifying the adenovirus in a cell line before lysing the cells. Thus, in some embodiments, the first linear nucleic acid molecule is present in a cell/virus lysate or is present in a DNA mixture isolated from cell/virus lysate. In some embodiments, the method involves co-electroporating the first linear nuclear molecule present in a mixture isolated from cell/virus lysate into a host cell together with the plasmid of step b) such that homologous recombination can occur. In some embodiments, the method comprises a step of phenol-chloroform extraction to isolate the adenoviral DNA from the sample. In some embodiments, the phenol-chloroform extraction involves taking the interphase protein-DNA complexes. In some embodiments, the mixture comprising adenoviral DNA is treated with proteinase K. In some embodiments, viral genomic DNA is extracted, e.g. from purified particles, by the addition of proteinase K, subsequent phenol-chloroform extraction, and ethanol precipitation.

[0239] In some embodiments, less than 2 ug (e.g. less than 1.75 ug, less than 1.5 ug, less than 1.25 ug) viral genomic DNA is used in the cloning method. In some embodiments, more than 200 ng (e.g. more than 300 ng, 500 ng, 700 ng, 800 ng, 900 ng) viral genomic DNA is used in the cloning method. In some embodiments, the amount of plasmid vector used in the cloning method is about the same as the amount of viral genomic DNA. For example, in some embodiments, about 1 ug viral genomic DNA is used in the cloning method together with about 1 ug plasmid vector. As shown in FIG. 2, very good efficiencies of homologous recombination are obtained using these amounts.

[0240] In embodiments in which it is desired to clone an adenovirus of unknown sequence, the method may comprise amplifying the adenovirus in a cell line, lysing the cells and purifying the virus from the crude cell lysate, e.g. by CsCl gradient, followed by viral genome isolation and sequence verification. Once the sequence of the ITR regions has been obtained, the method of cloning described herein can be used to clone the full length adenovirus. However, as there is often a degree of sequence homology between the ITR regions of different adenoviruses, it is possible to use a plasmid that has been designed to have sequence homology to the ITRs of one adenovirus to clone a different adenovirus, and the present invention also encompasses such embodiments.

[0241] The direct cloning method described herein advantageously provides a more efficient and quicker method for cloning full length adenoviral genomes than was previously available. Previously, most adenoviral cloning techniques involved modularly cloning regions of adenoviral genes and stitching them together in a BAC vector. Other studies which used homologous recombination based techniques to clone adenoviral genomes into plasmids used highly inefficient techniques which required long homology arms and pure concentrated forms of adenoviral DNA. For example, Renault et al. (Virol. Methods 2002) uses E. coli Top10F′, which is an E. coli strain that utilizes endogenous recA minus recombination, which is very inefficient.

[0242] Preferably, the linearized plasmid is designed so that it comprises a region of sequence homology with the 5′ ITR of the adenoviral sequence in the first linear nucleic acid molecule and a region of sequence homology with the 3′ ITR of the adenoviral sequence in the first linear nucleic acid molecule. In some embodiments, the region of homology is about 50 nt in length, for example, 50 nt, 50-55 nt, 50-60 nt, 50-70 nt, 45-50 nt, 40-50 nt, 30-50 nt, 45-55 nt, 40-60 nt, 30-70 nt or 40-80 nt in length. The skilled person will understand how to design the regions of sequence homology with a sufficient amount of sequence homology for homologous recombination to take place. In some embodiments, the region of sequence homology is 100% identical with the respective region of the adenoviral sequence. In some embodiments, there is a lesser degree of sequence identity (e.g. more than 90%, more than 95%, more than 98%), but there is sufficient sequence homology for homologous recombination to occur. This enables a plasmid vector designed to clone a first adenovirus to be used to clone a second adenovirus whose ITR regions share sufficient sequence homology with the first adenovirus. In some embodiments, the region of homology is only to a part of the ITR sequence rather than to the full length ITR sequence. In some embodiments, the region of homology is to the whole length of the ITR sequence. The 5′ ITR and 3′ ITR sequences are at the 5′ and 3′ ITR of the adenoviral genome and so designing the linearized plasmid so that these are the regions to be recombined ensures that the full length genome is cloned into the plasmid backbone. It would be straightforward for the skilled person to obtain the 5′ and 3′ ITR sequences from an adenoviral genome sequence, for example, from an adenoviral genome sequence as disclosed herein. In some embodiments, the 5′ and 3′ ITR sequences are from an adenoviral genome sequence as presented in Table 1, columns 3 and 5 respectively.

[0243] Accordingly, in some embodiments, the first linear nucleic acid molecule comprises a full length adenoviral genome sequence. In some embodiments, such a sequence will be present in the sample because of the presence of adenovirus in the sample. Preferably, the adenoviral sequence is the full length adenoviral genome sequence contained within any one of SEQ ID Nos 1-32 and/or 1411, for example, contained within any one of SEQ ID Nos 1-15, 17-32 and/or 1411 or contained within any one of SEQ ID NOs: 1-3, 5-8, 10-12, 14-15, 17-25 and 27-32 and/or 1411, or contained within any one of SEQ ID NOs: 1-3, 5-8, 10-12, 14-15, 17-25 and 27-32, or a sequence at least 50% identical thereto.

[0244] In preferred embodiments, the circular plasmid formed in step c) comprises a full length adenoviral genome sequence. However, in some embodiments, the adenoviral genome sequence cloned into the circular plasmid in step c) is missing one or more nucleotides at its 5′ and/or 3′ ends because one or both regions of sequence homology did not extend all the way to the 5′ and/or 3′ terminus, respectively, of the ITR sequence. For example, in some embodiments, the adenoviral genome sequence is missing less than 3, 5, 10, 15, 20, 25, 30, 35, 40, 50, 75, 100, 125 or 135 nucleotides from its 5′ and/or 3′ ends.

[0245] Accordingly, in a preferred embodiment there is provided a method for cloning an adenoviral genome sequence, comprising:
[0246] a) providing a sample comprising a first linear nucleic acid molecule which is an adenovirus, wherein the sample has not been subjected to a step of DNA purification;
[0247] b) providing a linearized plasmid which shares at least two regions of sequence homology with the first nucleic acid molecule, wherein the first and second regions of homology are to the 5′ ITR and 3′ ITR of the adenovirus of part a); and
[0248] c) bringing the first nucleic acid molecule and the linearized plasmid into contact in the presence of a 5′ to 3′ exonuclease and an annealing protein such that the first linear nucleic acid and the linearized plasmid recombine to form a circular plasmid containing the adenoviral genome sequence.

[0249] Any suitable linearized plasmid may be used. In some embodiments, the linearized plasmid comprises homology arms (HA) for directed cloning containing the 5′ and 3′ ITR sequences, one or more selection markers and an origin of replication. In some embodiments, the linearized plasmid comprises homology arms (HA) for directed cloning containing the 5′ and 3′ ITR sequences, one or more selection markers (e.g. the chloramphenicol resistance gene) and an origin of replication (e.g. the p15a origin). In some embodiments, the linearized plasmid comprises homology arms (HA) for directed cloning containing the 5′ and 3′ ITR sequences, one or more selection markers (for example, ccdB10 and ampicillin for advanced positive and counter selection), an origin of replication (e.g. p15A) and an antibiotic resistance gene (e.g. the chloramphenicol resistance gene). In some embodiments, the linearized plasmid is selected from a p15A origin-based vector, a pBR322 origin-based vector, a fosmid, a pUC origin-based vector or a ColE1 origin-based vector. Medium copy plasmids are preferred, for example, p15A, pBR322, pR6K, pRK2, pBBR1 and Inc-based plasmids, in particular p15A origin-based vectors. In some embodiments, the medium copy plasmid is p15A-cm-adHA, as described herein. In some embodiments, the plasmid is present in about 10 copies in each cell, for example 10 copies, 9-11, 8-12, 8-11 or 6-12 copies. Preferably, the plasmid used for cloning the adenovirus genome sequence is not a BAC. In some embodiments, the plasmid is a shuttle vector. In some embodiments the plasmid is less than 4 kb in length, for example, less than 3.5 kb, 3 kb, 2.5 kb, 2 kb, 1.5 kb or 1 kb in length.

[0250] Cloning the adenoviral genome into a medium copy plasmid provides a number of advantages compared to prior art methods which involved cloning adenoviral sequences into low copy BACs. For example, the present adenoviral plasmids allow a higher concentration of adenoviral vector to be obtained and increase the efficiency of transfection of the released adenovirus vectors into cells. The plasmid backbones described herein are more stable than the prior art backbones and make it possible to clone complete adenovirus genomes in a high-throughput manner without introducing recombinations or mutations into the cloned viral genome. The increased efficiency of the present method means the number of clones that need to be screened to find a correct recombinant is greatly reduced compared to the prior art methods which often required screening of around 400 clones. Advantageously, the cloning methods described herein make it possible to create a library of adenoviral genome sequences and adenoviral vectors, which was simply not feasible using the previous techniques.

[0251] Using a medium copy plasmid, such as a p15A origin plasmid, has a number of advantages compared to BACs. For example, medium copy plasmids such as p15A can be more stable than BACs. As another example, the medium copy plasmid makes the first cloning step easier become the homology arms can be ordered as oligonucleotides and attached to the plasmid by PCR in one or two steps, whereas each homology arm must be cloned into the BAC individually to generate a dedicated plasmid that then must be linearized. In addition, medium copy plasmids such as p15A may result in at least 10-time increased plasmid yields isolated from E. coli bacteria compared to that obtained using a BAC. Increased plasmid yields after plasmid purification compared to BAC purification procedures makes the first step of virus production (=transfection of DNA into the producer cell line) more feasible, because a sufficient amount is needed. In general the increased stability and efficiency enables high-throughput work which is in sharp contrast to conventional methods used for adenovirus genome cloning.

[0252] In some embodiments, the plasmid of step b) is linearized prior to electroporating it into a host cell in which homologous recombination occurs. In other embodiments, the plasmid of step b) is linearized in vivo, for example, using a rare site sequence-specific cutting enzyme, for example as described in reference 20.

[0253] Any suitable 5′ to 3′ exonuclease and annealing protein may be used. Preferably, the 5′ to 3′ exonuclease is full-length RecE (SEQ ID NO:1412) as described in reference 20 (incorporated herein by reference), or a protein with at least 70% sequence identity to the full-length form (preferably at least 80%, 85%, 90%, 95%, 96%, 97%, 98%, 99%, 99.5% or 99.9%) which retains the 5′ to 3′ exonuclease activity. The annealing protein is preferably RecT.

[0254] In some embodiments, the method comprises co-electroporating the first linear nucleic acid molecule and the linearized plasmid into a host cell that expresses full length RecE and RecT. In some embodiments, the method is carried out in a host cell in which full-length RecE is expressed under the control of an inducible promoter. In some embodiments, the host cell is an E. coli cell, for example, E. coli strain GBRed. Examples of suitable host cells are well known in the art, and are described in detail in reference 20. In some embodiments, the host cell expresses RecA and/or Red gamma.

[0255] Methods of direct cloning utilising full length RecE and RecT are described in detail in reference 20, which is hereby incorporated by reference in its entirety. Previous attempts to clone Herpes viruses using direct cloning have failed and so it is surprising that direct cloning works with adenoviruses.

[0256] In some embodiments, following the step of cloning the adenoviral genome, a step of sequencing is carried out to determine the sequence of the adenovirus.

[0257] In some embodiments, following the step of cloning the adenoviral genome, the method further comprises checking the integrity of the cloned adenoviral genome, for example, using diagnostic restriction enzyme digest and/or next generation sequencing.

[0258] In another aspect, the invention provides a cloning method as described herein to clone a viral genome sequence, preferably, a double stranded DNA viral genome sequence. In some embodiments, the virus is not an adenovirus. In some embodiments, the virus has a genome which is less than 70 kb in length, e.g. less than 65 kb, 60 kb, 55 kb, 50 kb, 45 kb, 40 kb or 35 kb in length. In some embodiments, the virus has a genome which is more than 10 kb in length, for example, more than 12 kb, 15 kb, 20 kb, 25 kb or 30 kb in length. For example, in some embodiments, the virus is between 10-70 kb in length, e.g. 15-70 kb, 15-60 kb, 20-60 kb, 20-55 kb, 20-45 kb, 25-55 kb, 25-45 kb or 35-45 kb in length. Similarly, the other methods and vectors may be used for other types of viruses. The skilled person would understand how to adapt the methodology and products described herein for different types of viruses.

[0259] The invention further provides a plasmid vector comprising a full length adenoviral genome sequence. Preferably, the plasmid has been obtained by or is obtainable by a method as described herein. Accordingly, the description provided of the adenoviral sequences and the plasmid vectors in the methodology described herein can be extrapolated to this aspect of the invention which is the plasmid vectors comprising the cloned adenoviral sequences. In some embodiments, the plasmid comprises a full length adenoviral genome sequence as described herein. For example, in some embodiments, the plasmid comprises the full length adenoviral genome sequence contained within any one of SEQ ID NOs 1-32 or 1411, or a sequence at least 70% identical thereto (preferably at least 80%, 85%, 90%, 95%, 96%, 97%, 98%, 99%, 99.5% or 99.9%). In some embodiments, the plasmid comprises the genome sequence contained within any one of SEQ ID NOs: 1-3, 5-8, 10-12, 14-15, 17-25, 27-32 and 1411, or a sequence at least 70% identical thereto (preferably at least 80%, 85%, 90%, 95%, 96%, 97%, 98%, 99%, 99.5% or 99.9%). In some embodiments, the plasmid comprises an adenoviral genome that has not previously been sequenced.

[0260] In some embodiments, the plasmid which contains the adenoviral sequence is a medium copy plasmid which comprises an origin of replication and a selectable marker such as an antibiotic resistance gene. In some embodiments, the plasmid comprises the p15A origin. In some embodiments, the plasmid is a medium copy plasmid which comprises an origin of replication, a selection marker and a full length adenoviral genome sequence, wherein the plasmid additionally comprises one or more restriction sites immediately upstream and immediately downstream of the adenoviral genome sequence, such that the adenoviral genome vector can be released from the plasmid vector. As mentioned above, in an alternative aspect of the invention, the plasmid comprises a full length viral genome sequence, which in some embodiments is not an adenoviral sequence. For example, the full length viral genome sequence may be from polyomaviruses or papillomaviruses.

[0261] The invention further provides a library of cloned adenoviral genomes. Preferably, the adenoviral genomes are full length adenoviral genomes. Thus, the invention provides a library of two or more (e.g. 2, 3, 4, 5, 6, 7, 8, 9, 10, 15, 20 or more) plasmid vectors each comprising a full length adenoviral genome sequence. Preferably, the two or more plasmid vectors have been obtained by or are obtainable by a cloning method as described herein. In some embodiments, the library comprises sequences of at least two (e.g. 2, 3, 4, 5, 6, 7, 8, 9, 10, 15, 20) different adenoviruses. For example, in some embodiments, there is a provided a library comprising two or more of the plasmid vectors comprising a full length adenoviral genome sequence that are described herein. In some embodiments, the cloned adenoviruses in the library are tagged with a reporter gene.

[0262] In another aspect, there is provided a plasmid that is suitable for use in step b) of the cloning method. The plasmid may be provided in circular form or in linearized form. For example, in some embodiments, the invention provides a plasmid comprising an origin of replication, a selection marker, and two regions of homology with the ITR regions of an adenoviral genome sequence, wherein one region has homology to the 5′ITR and a second region has homology to the 3′ITR. The descriptions of the plasmids for use in the cloning method of the invention can be extrapolated to this aspect of the invention. For example, in some embodiments, the plasmid is a medium copy plasmid such as a p15A, pBR322, pR6K, pRK2, pBBR1 or an Inc-based plasmid. In some embodiments the plasmid of this aspect of the invention will contain less than 1000 nt of adenoviral sequence, for example, less than 900, 800, 700, 600, 500, 400, 300, 250, 200, 150, 100, 50, 25, 15 or 10 nt.

[0263] The invention further provides a method for determining whether an adenovirus is present in a sample, comprising contacting the sample, or genomic DNA derived from the sample, with a linearized plasmid as described herein which comprises at least two regions of sequence homology with an adenoviral sequence in the presence of a 5′ to 3′ exonuclease and an annealing protein such that if an adenoviral genome sequence is present in the sample, it will recombine with the linear plasmid to form a circular plasmid containing an adenoviral sequence, and further comprising a step of determining whether a circular plasmid containing an adenoviral sequence has been formed. Advantageously, such a method may be carried out using a method for cloning an adenoviral sequence as described herein. In some embodiments, the linearized plasmid shares a region of sequence homology with the 5′ ITR of an adenoviral sequence and shares a region of sequence homology with the 3′ ITR of the adenoviral sequence. In some embodiments, the method further comprises the step of determining the identity of the cloned adenoviral sequence, for example, by sequencing all or part of the cloned adenoviral sequence and/or analysing the cloned adenoviral sequence using restriction enzyme digestion.

[0264] In some embodiments, the method comprises contacting a sample with a library of linearized plasmids comprising homology regions which have been designed to target different adenoviruses. In some embodiments, the method comprises contacting the sample with all the members of the library simultaneously. In some embodiments, the method comprises carrying out multiple experiments using individual members of the library. Thus, the invention further provides a library of plasmids that are suitable for use in step b) of a method for cloning as described herein, wherein the individual members of the library share regions of sequence homology with the 5′ ITR and 3′ ITR of different adenoviruses. In some embodiments, the library has at least 2, 3, 4, 5, 10, 15, 20, 25 or 30 members.

[0265] The invention also provides an adenoviral vector that has been released in linear form from the circular plasmid containing the adenoviral genome sequence, e.g. by restriction digestion, as described herein.

[0266] The method of generating a vector generally uses linear to circular homologous recombination (LCHR) to delete one or more regions of the adenoviral genome as discussed above. Accordingly, in one embodiment, the invention provides a method of generating an adenoviral vector or helper vector, comprising:
[0267] a) providing a first circular nucleic acid molecule comprising an adenoviral sequence selected from SEQ ID NOs:XX-XX, for example comprising a full adenoviral genome sequence selected from within any one of SEQ ID NOs 1-32 and 1411, or selected from within any one of SEQ ID NOs: 1-15 and 17-32 and 1411, or selected from within any one of SEQ ID NOs: 1-3, 5-8, 10-12, 14-15, 17-25 and 27-32, or a sequence at least 70% identical thereto (preferably at least 80%, 85%, 90%_{,} 95%, 96%_{,} 97%, 98%, 99%, 99.5% or 99.9%);
[0268] b) providing a second linear nucleic acid molecule which shares at least one region of sequence homology with the first nucleic acid molecule; and
[0269] c) bringing the first and second nucleic acid molecules into contact in the presence of a 5′ to 3′ exonuclease and an annealing protein such that a deletion, mutation and/or insertion is introduced in the first nucleic acid molecule.

[0270] Preferably the first circular nucleic acid molecule described in step a) has been generated using the LLHR direct cloning method described above. Accordingly, the description of the adenoviral sequence and the plasmid vector described for the cloning method can be extrapolated to this aspect of the invention. Thus, there is also provided a plasmid vector as described herein which comprises the modified adenoviral genome sequence obtained by or obtainable by this method of the invention. In some embodiments, the plasmid vector comprises the sequence of an adenoviral vector as described herein.

[0271] The adenoviral vector can be released in linear form from the first circular nucleic acid molecule e.g. by restriction digestion. To release the genome by restriction digestion, the circular nucleic acid molecule will comprise restriction sites both 5′ and 3′ of the adenoviral sequence. Thus, in some embodiments, the linearized plasmid used in the cloning method comprises restriction sites 5′ and 3′ of the two regions of sequence homology (i.e. so that the resulting circular nucleic acid molecule comprising the cloned adenoviral sequence comprises the restriction sites 5′ and 3′ of the adenoviral sequence). Accordingly, in some embodiments, the released adenoviral vector does not comprise any plasmid sequence. In some embodiments, the released adenoviral vector comprises less than 1000 nt plasmid sequence at the 5′ and/or 3′ end, for example, less than 900, 800, 700, 600, 500, 400, 300, 250, 200, 150, 100, 50, 25, 15 or 10 nt.

[0272] Suitable deletions are discussed above in relation to the vectors (for example, the E1 region and/or the E3 region, and/or other early gene regions). For the high-capacity vectors, all coding sequences are deleted. For oncolytic vectors, non-essential sequences (e.g. E3 sequences) may be deleted. Alternatively, mutations may be made using the second linear nucleic acid, for example in the E1 and/or E2 region. Insertions may also be made, for example to insert a transgene or other non-adenoviral DNA, for example as discussed above. Usually, if DNA is inserted, at least some non-essential regions of the adenoviral genome are deleted to create coding capacity for the inserted DNA.

[0273] For a deletion or mutation, the linear nucleic acid may be less than 180 nucleotides in length (for example, 150 nucleotides or less, 130 nucleotides or less, 110 nucleotides or less, 100 nucleotides or less, 80 nucleotides or less, 60 nucleotides or less or 55 nucleotides or less).

[0274] In some embodiments, the second linear nucleic acid molecule shares at least two regions of sequence homology with the first nucleic acid molecule, where the regions of sequence homology have been designed to remove the intervening sequence that is present in the adenoviral sequence. For example, the sequence homology may be to either side of the E3 region to delete the entire E3 region.

[0275] Alternatively, the second nucleic acid molecule may be longer and comprise heterologous (non-adenoviral) DNA e.g. comprising one or more transgenes, between two regions of homology (“homology arms”). This leads to replacement of the deleted sequences between the homology arms in the first nucleic acid molecule with the heterologous DNA between the homology arms in the second nucleic acid molecule. Such methods are usually carried out in conjunction with a method of inserting one or more transgenes into a vector of the invention, as described below.

[0276] The first circular nucleic acid molecule may be e.g. a bacterial artificial chromosome (BAC), a p15A origin-based vector, a pBR322 origin-based vector, a fosmid, a pUC origin-based vector or a ColE1 origin-based vector. However, medium copy plasmids are preferred, for example, p15A, pBR322, pR6K, pRK2, pBBR1 and Inc-based plasmids, in particular p15A origin-based vectors.

[0277] Suitable 5′ to 3′ exonucleases include RecE²⁰ and Red alpha³⁶. These exonucleases are used in conjunction with the annealing proteins RecT and Red beta, respectively. The RecE may be either full-length (SEQ ID NO:1412) or a truncated form (e.g. RecE588 or RecE602), as described in reference 20 (incorporated herein by reference), or a protein with at least 70% sequence identity to the full-length or truncated form (preferably at least 80%, 85%, 90%, 95%, 96%, 97%, 98%, 99%, 99.5% or 99.9%). The Red alpha/Red beta system is preferred. If RecE is used, truncated RecE is preferred.

[0278] In some alternative embodiments of generating a vector using linear to circular homologous recombination (LCHR) to delete one or more regions of the adenoviral genome, the first nucleic acid molecule described above which comprises the adenoviral sequence is linear (e.g. a linearized form of the circular nucleic acid molecule generated using the LLHR cloning method described herein, wherein the first nucleic acid is linearized either in vivo in the recombination-competent host cell, or is linearized in vitro) and the second nucleic acid is provided in circular form. The various embodiments described herein can be adapted to this alternative embodiment.

[0279] In some embodiments, the method of cloning using LLHR and the method of deleting one or more regions of the adenoviral genome using LCHR, as described above, are carried out in the same host cell. In some embodiments, the host cell expresses full length RecE under the control of an inducible promoter and either truncated RecE and/or Red alpha under the control of one or more different inducible promoters. In addition, in such embodiments, the host cell also expresses the corresponding annealing proteins RecT and Red beta, respectively. Advantageously, such a host cell allows independent temporal expression of the full length RecE/RecT system and the Red alpha/Red beta or truncated RecE/RecT system, such that the required recombination proteins can be activated at the point in time that they are required.

### Methods of Generating Cells

[0280] The invention also provides a method of generating a cell as defined above. The method comprises transforming a cell with DNA encoding, and capable of expressing, at least an adenoviral E1 region selected from SEQ ID NOs:1-3, 5-8, 10-12, 14-15, 17-25 or 27-32, or a sequence at least 70% identical thereto (preferably at least 80%, 85%, 90%, 95%, 96%, 97%, 98%, 99%, 99.5% or 99.9%). Typically, the DNA encoding the E1 region also encodes a selectable marker (for example neomycin, puromycin, hygromycin etc.). The selectable marker allows detection of cells into which the DNA carrying the E1 region has integrated stably.

[0281] Means for expressing the E1 region and the selectable marker include e.g. an IRES or a promoter.

[0282] The method may also comprise transforming a cell with DNA encoding, and capable of expressing, Cre recombinase (Accession No. P06956) or Flp recombinase (Accession No. P03870). These cell lines are used when a helper vector is required.

### Methods of Inserting Transgenes

[0283] The invention provides a method of inserting one or more transgenes into an adenoviral vector or helper vector according to the invention (including e.g. oncolytic or vaccine vectors). This method may be performed in conjunction with the method of generating an adenoviral vector as set out above.

[0284] In one embodiment, the invention provides a method of inserting one or more transgenes into an adenoviral vector or helper vector, comprising:
[0285] a) providing a first circular nucleic acid molecule comprising an adenoviral sequence selected from SEQ ID NOs:1-15 and 17-32, or for example comprising a full adenoviral genome sequence selected from within any one of SEQ ID NOs 1-32 and 1411, or selected from within any one of SEQ ID NOs: 1-15 and 17-32 and 1411, or selected from within any one of SEQ ID NOs: 1-3, 5-8, 10-12, 14-15, 17-25 and 27-32, or a sequence at least 50% identical thereto (preferably at least 60%, 70%, 80%, 85%, 90%, 95%, 96%, 97%, 98%, 99%, 99.5% or 99.9%);
[0286] b) providing a second linear nucleic acid molecule which shares at least two regions of sequence homology with the first nucleic acid molecule; and
[0287] c) bringing the first and second nucleic acid molecules into contact in the presence of a 5′ to 3′ exonuclease and an annealing protein such that sequences between the regions of homology in the second nucleic acid molecule are introduced into the first nucleic acid molecule.

[0288] Preferably the first circular nucleic acid molecule described in step a) has been generated using the LLHR direct cloning method described above. Accordingly, the description of the adenoviral sequence and the plasmid vector described for the cloning method can be extrapolated to this aspect of the invention. Thus, there is also provided a plasmid vector as described herein which comprises the modified adenoviral genome sequence obtained by or obtainable by this method of the invention.

[0289] For vector production the adenoviral vector can be released in linear form from the first circular nucleic acid molecule e.g. by restriction digestion. To release the genome by restriction digestion, the circular nucleic acid molecule will comprise restriction sites both 5′ and 3′ of the adenoviral sequence.

[0290] The method may also involve a deletion of part of the adenoviral sequence, as discussed above.

[0291] The second linear nucleic acid molecule may comprise the transgene(s) of interest, such that the transgene(s) is/are inserted into the first nucleic acid molecule in one step. Alternatively, the method may be a two- or multi-step process in which the second linear nucleic acid molecule comprises e.g. a selectable marker, which is inserted into the first circular nucleic acid molecule in a first step. A second step is then carried out comprising (a) to (c) above, but with a third linear nucleic acid molecule in place of the second linear nucleic acid molecule. The third linear nucleic acid molecule carries the transgene(s) of interest, and comprises at least two regions of sequence homology with the intermediate circular nucleic acid molecule (which corresponds to the first circular nucleic acid molecule comprising sequence inserted from the second linear nucleic acid molecule).

[0292] In some embodiments, the at least two homology regions on the second linear nucleic acid molecule are designed to target the transgene to the E3 region of the adenoviral genome sequence. In some embodiments, inserting the transgene simultaneously results in deletion of sequence within the adenoviral genome sequence, e.g. the E3 region. In some embodiments, the transgene is inserted into a region corresponding to a deleted sequence in the adenoviral sequence, e.g. the deleted E3 region. In some embodiments, the transgene is inserted in the adenoviral sequence without deleting any adenoviral sequence.

[0293] Advantageously, the use of a method of inserting a transgene allows tagged adenoviral vectors to be generated. In some embodiments, the second linear nucleic acid molecule is designed to comprise homology regions to a region that is conserved between adenoviral sequences, e.g. a conserved region in the E3 region, such that different adenoviral genomes can be tagged in a high-throughput manner using identical plasmid vectors.

[0294] Suitable 5′ to 3′ exonucleases and annealing proteins include those described above for methods of generating the adenoviral vectors of the invention.

[0295] In some alternative embodiments of inserting one or more transgenes, the first nucleic acid molecule described above which comprises the adenoviral sequence is linear (e.g. a linearized form of the circular nucleic acid molecule generated using the LLHR cloning method described herein, wherein the first nucleic acid is linearized either in vivo in the recombination-competent host cell, or is linearized in vitro) and the second nucleic acid is provided in circular form. The various embodiments described herein can be adapted to this alternative embodiment.

### Methods for Obtaining Packaged Vectors or Oncolytic Viruses

[0296] The adenoviral vector can be released in linear form from a circular nucleic acid molecule as described above, and the DNA vector purified using standard procedures. The linear DNA can be transfected into target cells for vector amplification. If the vector is replication-deficient, the cell line will be a “producer cell line” as described above, which complements for one or more essential genes missing from the adenoviral vector. If the vector is helper-dependent, then the helper vector is also transfected into the producer cell line.

[0297] Packaged vectors or oncolytic viruses can be obtained from the cells, for example by cell lysis and particle purification using standard procedures.

[0298] Helper viruses can be separated from packaged high-capacity vectors, for example by ultracentrifugation on cesium chloride density gradients and/or anion exchange and size exclusion chromatography.

### Methods for Screening Potential New Drug Targets for Anti-Adenoviral Therapeutic Strategies

[0299] The adenoviral library disclosed herein can also be used to screen for potential new drug targets for anti-adenoviral therapeutic strategies. Currently, there are no anti-adenoviral drugs available, and until now a system for drug screening against many different serotypes has not been available due to the lack of cloned adenoviral genomes. For this purpose, adenoviral genome sequences comprising reporter genes are constructed, based on the adenoviral library disclosed herein.

[0300] Therefore, the invention provides an adenoviral sequence selected from SEQ ID NOs:1-3, 5-12, 14-15 and 17-32, comprising one or more reporter genes and means for their expression, replacing part or all of the E3 region.

[0301] Suitable reporter genes include a gene encoding a fluorescent protein, for example green fluorescent protein (GFP), and/or a luciferase gene. Multiple reporter genes can be inserted so that different assays can be conducted. These reporter genes thereby allow the identification of the tropism of the adenovirus as they can be used to establish the level of infectivity of that adenovirus in cell lines derived from different tissues.

[0302] Vectors comprising such sequences are also provided. Preferably, the vector carrying the above sequence is a medium copy plasmid, for example, a p15A, pBR322, pR6K, pRK2, pBBR1 or an Inc-based plasmid. Plasmids with a p15A origin are particularly preferred.

[0303] In one embodiment, the invention provides a method of screening for potential anti-adenoviral drugs, comprising:
[0304] a) infecting a cell with a vector comprising one or more reporter genes and means for their expression, as described above, in the presence and in the absence of a drug of interest;
[0305] b) detecting the expression level of the reporter gene product in the presence and in the absence of the drug; and
[0306] c) comparing the expression level of the reporter gene product in the presence and in the absence of the drug.

[0307] The relative expression levels of the reporter gene product(s) in the presence versus the absence of the drug give an indication of whether the drug reduces adenovirus infectivity (i.e. has anti-adenoviral activity). If the expression level is reduced in the presence of the drug, relative to the absence of the drug, it indicates lower infectivity in the presence of the drug, and therefore likely anti-adenoviral activity of the tested drug.

[0308] The above method can be used for high-throughput drug screening.

[0309] In some embodiments of the various aspects disclosed herein, the adenoviral sequence is not a sequence derived from at least one of (e.g. of 1, 2, 3, 4 or all 5 of) the adenoviruses selected from the group consisting of B3, B11, B35, C5 and D26. For example, in some embodiments of the various aspects disclosed herein, the adenoviral sequence is not a sequence derived from at least one of (e.g. of 1, 2 or all 3 of) the adenoviruses selected from the group consisting of B11, B35 and C5. For example, in some embodiments of the various aspects disclosed herein, the adenoviral sequence is not a sequence derived from at least one of (e.g. of 1, 2 or all 3 of) the adenoviruses selected from the group consisting of B3, B35 and C5. For example, in some embodiments of the various aspects disclosed herein, the adenoviral sequence is not a sequence derived from the C5 adenovirus. However, in some embodiments of the various aspects of the invention, the invention does extend to adenoviral sequences derived from at least one of (e.g. of 1, 2, 3, 4 or all 5 of) the adenoviruses selected from the group consisting of B3, B11, B35, C5 and D26.

### BRIEF DESCRIPTION OF THE FIGURES

[0310] FIG. 1—Schematic outline of wild-type adenovirus amplification and viral genome isolation

a) Wild-type human adenoviruses from clinical isolation were first pre-amplified in individual permissive cell lines (50˜80% confluence, 2% FBS) using repeated infection circles to achieve 90% cytopathic effect (CPE). Then each virus was amplified in a large scale manner in 10-20 15 cm tissue culture dishes. Crude cell lysates were used to purify viruses by CsCl gradients, followed by viral genome isolation and sequence verification.
b) Genome isolation of different Ad types visualized on an agarose gel.

[0311] FIG. 2—Direct cloning (HTC) of Ad genomes by LLHR

a) Prototypal strategy to direct clone Ad genomes by LLHR. The shuttle vector p15A-cm-adHA was constructed by co-electroporation of four DNA fragments sharing terminal homologous arms (HAs) into the RecET expressing E. coli strain GBred-gyrA462, which has an R462C mutation in the GyrA subunit of DNA Gyrase that confers resistance to CcdB expression. The final vector p15A-cm-AdV was generated via a second LLHR step in RecET expressing E. coli strain GBred by co-electroporation of the linearised shuttle vector and the linear double-stranded adenoviral DNA (linear-dsDNA). NdeI and BamHI restriction digestion was used to linearize the circle plasmids.
b) Recombineering efficiency for shuttle vector construction using different amounts of PCR products in four experimental settings.
c) Recombineering efficiencies of viral genome cloning using various amounts of viral genomic DNA (0 to 1 μg) and 1 μg of the linearized shuttle vector. Error bars, s.d.; n=3.
d) Single-PCR based Ad genome cloning. The vector backbone p15A-cm was generated by a single PCR from a modified plasmid p15A-cm-MCs2.0. ˜50 bp homology arms (HAs) were incorporated into individual Ad genomes via primer design.
e) Direct Ad genome cloning from cell/virus lysate. Instead of purified Ad genome, a DNA mixture isolated from cell/virus lysate, or a clinical sample, was co-electroporated.
f) Left panel: Strategy to rescue engineered Ads. Different molecular forms based on restriction enzyme (RE) digest for different virus rescue strategies are shown. Right panel: Influence of the genome-releasing status on virus rescue efficiency after DNA transfection into permissive cells. Y-axis indicates viral genome copy numbers isolated from cell/virus lysates collected after each passage. X-axis is the passage number after transfection. dd, completed exposed adenoviral genome released by double-digest; sc, linearized adenoviral genome released by single-cutter; p, circular plasmid. Amp, ampicillin; cm, chloramphenicol; ccdB, counter-selection marker.

[0312] FIG. 3—Ad genome tagging and in vitro/in vivo characterisation

a) Strategy for high-throughput ad genome tagging by linear-circular homologous recombination (LCHR). The E3 region was first deleted by integration of the spect-cassette, which was then replaced by the multicistronic/triple-expression cassette (GLN).
b) In vitro characterisation of tagged Ad. Transgene expression efficiency of different Ad types was compared to the common used Ad5, and indicated as fold-change. Luciferase expression was measured by addition of furimazine substrate and indicated by luminescence units (RLU).
c) Bio-distribution study of tagged Ad in transgenic mice.

[0313] FIG. 4—Recombineering toolkit for Ad genome tagging including plasmid maps and sequences of pR6K-spect-adapter and pR6K-GLN

a) pR6K-spect-adapter serves as a PCR template to amplify selection marker spectinomycin adenyltransferase (spect), which is flanked by the same homologous arm (HAR and HAL) as the reporter cassette GLN (shown in b). EcoRI restriction enzyme digest releases the PCR template. The R6K backbone is used to avoid plasmid contamination.
b) pR6K-GLN provides the reporter gene cassette GLN which is released by EcoRI restriction enzyme digest. E. coli strain GB05-Red harbouring an arabinose inducible gbaA operon (redγ, redβ, redid and recA) at the ybcC locus2 mediates highly efficient LCHR. E. coli strain GBred-gyrA462 is generated from GB05-Red with the Arg462-coding codon CGT been changed into Cys-coding codon TGC, allowing resistance to CcdB expression³⁷. All plasmid maps used in this study are created with SnapGene software.

[0314] FIG. 5—Summary of the complete pipeline to study natural Ad diversity and to generate an engineered Ad library including tagging of viral genomes

[0315] The process begins with wild-type adenovirus amplification in respective permissive cell lines (e.g. HeLa, HEK, A549). After virion purification the adenovirus genomic DNA is isolated and verified by sequencing and restriction enzyme digest. According to the sequence identification the shuttle vector p15A-cm-adHA is computationally designed, and constructed by co-electroporation of four DNA fragments containing homologous arms (HA) to each other into the RecET expressed E. coli strain, where LLHR takes place. In the next step, the adenoviral genome is incorporated into the linearised shuttle vector containing HA to each ITR end via LLHR. Sequence-verified plasmids harbouring adenoviral genomes are collected together building up an engineered adenoviral library. To prove integrity of the cloned adenovirus genomes rescue experiments were performed. Marker gene GFP/LUC tagging was mediated by linear-circular homologous recombination (LCHR). The E3 region was first deleted by integration of the ccdB-Amp cassette, which was then replaced by a P2A peptide-mediated bicistronic-expression cassette expressing a Turbo Green fluorescent protein and a NanoLuc luciferase (tGFP-Nluc) to generate p15A-cm-AdV-tGFP-Nluc. The tagged adenovirus AdV-delE3-tGFP-Nluc can be reconstituted in its permissive cell line and further evaluated in vivo.

[0316] FIG. 6—Genome organisation of cloned adenoviruses

[0317] FIG. 7—HCAdV-CRISPR/Cas9 pipeline (1)

[0318] Cloning of three guide RNAs and the Cas9 coding sequence expressed under the control of a constitutive or an inducible promotor into the shuttle vector.

[0319] FIG. 8—HCAdV-CRISPR/Cas9 pipeline (2)

[0320] Cloning of three guide RNAs and the Cas9 coding sequence expressed under the control of a constitutive or an inducible promotor into the high-capacity adenoviral vector.

[0321] FIG. 9—HCAdV-CRISPR/Cas9 pipeline (3)

[0322] Production of high-capacity adenoviral vectors containing the CRISPR/Cas9 machinery.

[0323] FIG. 10—Recombineering pipeline for construction of adenovirus-Sleeping Beauty transposon hybrid vectors

[0324] After cloning the gene of interest into the shuttle vector pHM5-FRT-IR it can be transferred to the high-capacity adenoviral vector by recombineering.

[0325] FIG. 11—HAdV17 has tropism for endothelial cells in vitro

A. Cell line screening in vitro. HEK293, A549, Hela, Huh7, Jurkat, MMDH3, SKHep, SKOV3 and EA.hy926 cells were seeded in 24 well plates the day before infection. When 90% confluent, cells were transduced with HAdV5GFP and HAdV17GFP at various multiplicities of infection (0.1, 1, 10 or 100 per cell) for 2 h. GFP expression was analysed 24 h post-infection by FACS. Uninfected cells (negative controls) were used to set the background gate at approximately 1%. Percentages of GFP-positive cells are given.
B. Growth curve comparison between wild type HAdV17 and HAdV5. HEK293, A549, Hela and EA.hy926 were seeded in 24 well plates the day before infection. When 80% confluent, cells were transduced with wild type HAdV5 and HAdV17 at a multiplicity of infection (MOI) of 10. Cells were harvested at various time points (2, 10, 24, 48, 72 hours), and quantitative PCR was performed after cellular DNA isolation to detect assay for virus replication.
C. Virus internalization analysis by quantitative PCR. HEK293, A549, Hela and EA.hy926 were infected at MOIs of 0.1, 1, 10, 100 of HAdV5GFP and HAdV17GFP in 24 well plates for 2 h. Afterwards cells were treated with 5% trypsin for 3 min, centrifuged at 500 g for 3 min and washed twice with DPBS to ensure that only internalised viral particles were analysed. Total cellular DNA (including the adenoviral DNA) was extracted, and quantitative real-time PCR was performed to detect viral genome. Data points represent mean standard error based on three independent experiments (n=3).

[0326] FIG. 12—Transduction of primary human umbilical vein cells (HUVEC)

[0327] Transduction of primary human umbilical vein cells (HUVEC). Primary HUVECs were transduced with HAdV5GFP and HAdV17GFP at various multiplicities of infection (0.1, 1, 10 or 100 per cell) for 2 hours. (A) GFP-positive cell numbers and (B) mean fluorescent intensity were analysed 24 h post-infection by FACS. Uninfected cells (negative controls) were used to set the background gate at approximately 1%. (C) Histograms show the surface markers hCAR on HEK293, HeLa, EA.hy926 and HUVEC by flow cytometry. (D) Quantitation of mean fluorescent intensity of CAR expression on cell surfaces. HeLa, EA.hy926 and HUVEC cells were stained with an anti-CAR antibody labelled with FITC and measured by flow cytometry. As negative controls each cell line was also incubated without supplementation of the primary antibody. Data points represent mean standard error (n=3).

[0328] FIG. 13—Validation of endothelium tropism that is dependent on interaction between CD46 and HAdV17 fiber by gain of function study

(A) Schematic representation of chimeric fiber proteins incorporated into HAdV5 capsid and structure of chimeric fiber genes (knob, shaft and tail). White depicts the fiber derived from HAdV5GFP and black depicts the fiber derived from HAdV17GFP. HAdV5GFP/17knob contained the shaft and tail from HAdV5 and knob from HAdV17. HAdV5GFP/17 fiber contained the tail from HAdV5 and both shaft and knob from HAdV17. (B) HEK293 and EA.hy926 cells were seeded in 24 well plates the day before infection. When 90% confluent, cells were transduced with HAdV5GFP, HAdV5GFP/17fiber, HAdV5GFP/17Knob and HAdV17GFP at various multiplicities of infection of (0.1, 1, 10 or 100 per cell) for 2 h. GFP expression was analysed 24 h post-infection by FACS. Uninfected cells (negative controls) were used to set the background gate at approximately 1%. Percentages indicate percentage of GFP-positive cells. MFI=mean fluorescent intensity. Data points represent mean standard error (n=3).

[0329] FIG. 14—in vivo biodistribution of HAdV17GFP vectors

[0330] Viral genomes were detected by real-time quantitative PCR in various organs (liver, heart, lung, artery, kidney, pancreas, spleen, intestine and brain) harvested 72 hrs after systemic administration of 2×10⁹ transducing units per mouse of HAdV17GFP into both CD46 transgenic mice and wild-type mice. HAdV5GFP was administered to wild-type mice as a control (n=3 mice per group).

[0331] FIG. 15—Immunofluorescence analysis of liver sections

[0332] Mice were sacrificed at 3 days after vector injection, and livers were excised for histology. (A) The top panel shows colocalisation of viral transgene (GFP) expression (green) with endothelial markers (CD31, red) from CD46 transgenic mice injected with HAdV17GFP. Single stained and merged images at 20× magnification are presented. The scale bar of images is 100 μm.

[0333] The 4^{th} panel from the top is from wild type mice injected with HAdV17GFP. The 5^{th} panel from the top is from wild type mice injected with HAdV5GFP. PBS treated transgenic mice (3^{rd} panel from the top) and PBS treated wild type mice (6^{th} panel from the top) are controls. The 2^{nd} panel from the top is from CD46 transgenic mice injected with HAdV17GFP without CD31 primary antibody treatment. (B) The 7^{th} and 8^{1h} panels from the top are views at a higher magnification (60×) of the first panel. Images are representative of multiple fields of view. The scale bar of images is 25 μm.

[0334] FIG. 16—Neutralising antibody assay for HadV17

(A) Reciprocal dilution of dog serum, immunised with HAdV-5, was incubated with HAdV17GFP and HAdV5GFP. The serum-virus mixture was used to infect HEK293 cells and 24 hours post-infection, GFP expression levels were determined. (B) Preexisting immunity to HAdV17 in patients. Transduction assays were carried out in the presence of serum samples from 19 patients. Samples were considered neutralising if greater than 90% reduction in transduction (below 10% residual transduction) was seen in comparison to a no-serum control.

[0335] FIG. 17—Schematic structure of different virus vectors used in Example 3

(A) Diagram of ccdB recombineering to construct first generation p15a-HAdV17GFP. (B) Schematic structure of pseudotyping HAdV5GFP with knob or fiber from HAdV17.

[0336] FIG. 18—Generating stable complementing cell lines based on HEK293 and A549 cells using the plasmid pIRES-neo

(A) E1 cassette from HAdV17 (2808 bp) was amplified by PCR and ligated into multi cloning site of pIRESneo3 (clontech) to construct the vector pCMV-HAdV17E1-IRES-neo. (B) Methylene blue staining was performed to mark the positive cell clones. (C) PCR and RT-PCR were performed to analyse each cell clone. Genomic DNA was isolated from each cell clone and eluted in dH₂O. Total RNA was isolated and resuspended in RNase-free H2O. Reverse transcription was performed, and 5 μl of the cDNA was used for PCR. A negative control without reverse transcriptase was performed.

[0337] FIG. 19—Histograms show the surface markers of hCAR and CD46 expression level in various cell lines by flow cytometry

[0338] 0.5×10⁶ cells (HEK293, A549, HeLa, EA.hy926, MMDH3 and HCT116) were counted and washed with PBS supplemented with 1% BSA, centrifuged (1500 g, 3 min), and resuspended in 100 μl PBS/BSA and 2.5 μl anti-hCAR antibody (Santa Cruz, sc-56892) following an incubation step at 4° C. for 1 hour. Afterwards the cells were washed again with PBS/BSA to remove unbound antibody, resuspended in 100 μl PBS/BSA and 0.5 μl of an APC labeled goat anti-mouse secondary antibody (Santa Cruz, sc-3818), and incubated for 1.5 hours at 4° C. with continuous shaking. Afterwards cells were again washed with PBS/BSA and finally resuspended in 400 μl PBS for flow cytometry using FACS (BD). As negative controls each cell line was also incubated without supplementation of the primary antibody. Data points represent mean standard error (n=3).

[0339] FIG. 20—High-throughput screening (HTS) of the reporter-tagged human adenovirus library in a panel of human tumour cells

[0340] Transgene expression efficiency of different adenovirus types (Ad type number) was tested in a panel of disease-specific cell lines. Levels were compared to the commonly used adenovirus type 5 (Ad5) and indicated as fold change. Luciferase expression was measured by addition of Furimazine substrate and expressed as relative light units (RLU). In all cell lines error bars represent mean±SD with the exception that in A549 and MG-63 is mean±SEM.

[0341] FIG. 21—High-throughput screening (HTS) to identify virus candidates with high oncolytic potency in osteosarcoma cells

(A) Transduction of two osteosarcoma cell lines. 200 vp/cell were applied with three independent experiments performed. Error bars denote s.e.m. Data were analysed by two-tailed unpaired t-test. P-values for analysed virus types compared to Ad5 were <0.05 if not otherwise stated. NS, not significant; vp, viral particles.
(B) Virus internalization efficiency in three osteosarcoma cell lines. Cells were infected with individual viruses at 2,000 vp/cell for three hours to determine viral genome copy numbers (VCN), which were quantified by qPCR and expressed as VCN per 10 ng total DNA. Error bars represent mean±SD. n=3 per group. Data were analysed by two-tailed unpaired t-test. P-values for analysed virus types compared to Ad5 were >0.05 if not otherwise stated. *, significant (p<0.05).
(C) Visualization of GFP-expression 2 days post infection. Cells were infected at 1,000 viral particle (vp) per cell.
(D) Crystal violet staining of viable cells was used to evaluate oncolytic activity 7 days after infection.

[0342] FIG. 22—High-throughput screening (HTS) to identify virus candidates with high oncolytic potency

[0343] Oncolysis assay performed in A549 cells as oncolytic assay control. Crystal violet staining of viable cells was used to evaluate oncolytic activity 7 days after infection.

[0344] FIG. 23—Transgene expression efficiency of different adenovirus types (Ad type number) in the cell line RG2 [D74] at 2000 virus particle per cell (vp/c)

[0345] Ad5, Ad21 and Ad37 showed high luciferase (26 hs p.i.) and GFP expression (2 ds p.i.), albeit without being significant. All three viruses reached about the same dimension of efficiency. Furthermore Ad20 reached more than 20% of the efficiency of Ad5. Luciferase expression was measured by addition of Furimazine subtract and expressed as relative light units (RLU). Transgene expression levels were compared to the commonly used adenovirus type 5 (Ad5) and indicated as fold change. Error bars represent standard error of the mean (SEM). Data were analysed by two-tailed unpaired t-test. P-values for analyzed virus types compared to Ad5 were <0.05 if not otherwise stated. “NS” means “not significant (p>=0.05)”.

[0346] The invention is further described with reference to the following non-limiting examples:

### EXAMPLES

### Example 1—Cloning Adenoviral Genomes

[0347] Clinical isolates of wild type (WT) Ad were amplified in permissive cell lines (e.g. HeLa, HEK, A549) using serial amplification steps. After large-scale amplification Ads were purified by cesium chloride gradients (FIG. 1). To verify the Ad type a multiplex hexon-specific PCR was performed and the DNA sequence was confirmed. Viral genomes of purified Ad particles were isolated (FIG. 1) and LLHR was applied to directly clone isolated viral genomes as schematically shown in FIG. 2. We first established a fast and reliable strategy to generate master clones for direct Ad genome cloning based on annealing of 4 PCR fragments in one step. These PCR fragments with homology arms (HA) for directed cloning contained the 5′ and 3′ ITR sequences, the previously published selection marker ccdB10 and ampicillin for advanced positive and counter selection and the plasmid backbone with a p15A origin of replication and the chloramphenicol resistance gene (FIG. 1). Different ratios of PCR products were tested, and after homologous recombination (HR) in a RecET expressing E. coli strain this resulted into the novel medium copy plasmid p15A-cm-adHA. Equal amounts of all 4 PCR fragments resulted in highest cloning efficiency (FIG. 2b).

[0348] Next, isolated linear Ad genomes were cloned into this plasmid using LLHR. FIG. 2c shows recombineering efficiencies of direct viral genome cloning using various amounts of viral DNA (0 to 1 μg) and 1 μg of the linearised shuttle vector. The plasmid backbone for direct cloning of large dsDNA viruses containing the p15A origin of replication results in significantly increased cloning efficiencies and is easier to handle compared to commonly-used bacterial artificial chromosomes (BAC). Since numerous viral genomes show high sequence homologies in their ITR sequences, viral genomes could be cloned simultaneously using the same shuttle vector p15A-cm-adHA containing the same HA. Only 50 bp HA are required, enabling fast and reliable direct HTC. The same strategy was used for Ad from species D, B2 and C.

[0349] Integrity of all cloned Ad genomes was checked by diagnostic restriction enzyme digests and compared to originally isolated Ad genomes from virions (FIG. 2). NGS was used to determine exact sequences of all Ad containing plasmids. Extensive rescue experiments were performed and the strategy optimised by testing different molecular forms (precise excision of the Ad genome, linearised Ad containing plasmid and circular Ad genome containing plasmid) (FIG. 3). After introduction of viral DNA into Ad permissive cell lines, viral replication was monitored by quantitative PCR (qPCR) over more than 5 serial passaging steps and the precise excision of the Ad DNA molecule from the plasmid was most sufficient in rescuing Ad. This strategy was then applied to all cloned human Ad.

[0350] To further explore the cloned human Ad library, viral genomes were tagged with a 2A peptide-mediated multicistronic-expression cassette (GLN, SEQ ID NO:227) providing a TurboGFP fluorescent protein as an in vitro marker, a NanoLuc luciferase for in vivo studies and kanamycin/neomycin as a selection marker. As schematically outlined in FIG. 3, LCHR was applied for marker insertion into the early gene E3 region of the cloned Ad genomes of the library. In a first step, spectomycin acetyltransferase was inserted via HR in E. coli strain GB05-Red into the adenoviral genome, followed by GLN cloning. By using a conserved region in the E3 region, different Ad genomes could be tagged in a high-throughput manner using the identical shuttle vector for different Ad types (FIG. 4). Tagged Ads were rescued in permissive cell lines.

[0351] Tagging of Ad enabled in vitro and in vivo characterisation of chosen Ad types. After infection of cell lines originating from different cell types derived from different organs (epithelium, endothelium, muscle, blood, liver) and measurement of luciferase and GFP expression it was found that tagged Ad show a distinct tropism (FIG. 3). The in vivo tropism was analysed by systemically injected tagged HAdV-B3, HAdV-616, HAdV-650, HAdV-05, and HAdV-E4 into 057BI/6 mice. As shown in FIG. 3, viruses also showed a distinct biodistribution as detected by transgene expression levels and viral genome level. A summary of the complete pipeline to study natural Ad diversity and to generate an engineered Ad library including tagging of viral genomes is shown in FIG. 5.

### Methods for Example 1 and Other Examples

[0352] Cell Culture—

[0353] Human Hela cells, A549 cells, HEK293, and EA.hy926 cells were grown in high glucose Dulbecco's Modified Eagle's Medium (DMEM, PAN BIOTECH) supplemented with 10% FBS (GE Healthcare), 100 U ml-1 penicillin (PAN-BIOTECH), and 100 μg ml-1 streptomycin (PAN BIOTECH). For human hepatocyte Huh7, Non-Essential Amino Acid (NEAA) was added. For Jurkat cells, RPMI-1640 based Medium supplemented with 10% FBS, 100 U ml-1 penicillin and 100 μg ml-1 streptomycin was used. For the murine cell line Neuro2a (N2a) cells, Eagle's Minimum Essential Medium (EMEM, GE Healthcare), supplemented with 10% FBS, 100 U ml-1 penicillin and 100 μg ml-1 streptomycin was used. For the murine myoblast C2C12 cells, DMEM supplemented with 10% FBS, 100 U ml-1 penicillin and 100 μg ml-1 streptomycin was used.

[0354] Wild Type Adenoviruses—

[0355] HAdV-05 (ATCC® VR5™) strain and HAdV-F41 (ATCC® VR930™) was obtained from the American Type Culture Collection (ATCC). HAdV-A12, -A18, -A31, -B3, -B16, B21, -B11, -B14, -B35, -C6, -D9, -D10, -D13, -D17, -D20, -D24, -D25, -D26, -D27, -D33, -D37, -D69 and -E4 were clinical isolates obtained from the diagnostic group of the Max von Pettenkofer-Institute (Department of Virology) at the Ludwig-Maximilians-University Munich in Germany. HAdV-B7, -B50, -B34, -C1, -C2, -D8 and -G52 were kindly provided by the Heinrich Pette Institut (HPI) Hamburg, Germany.

[0356] Ad Amplification, Purification and Titration—

[0357] WT human Ad from clinical isolates were first pre-amplified in individual permissive cell lines (50˜80% confluence), with serial infection circles to achieve 90% cytopathic effect (CPE). Each virus was amplified to large scale in 10-20 15 cm tissue culture dishes. For virus amplification DMEM supplemented with 2% FBS was used. Crude cell lysates were used to purify viruses by a CsCl gradient-based ultracentrifugation method (Beckman Coulter), followed by a desalting step based on disposable PD-10 desalting columns (GE Healthcare). The purified virus was aliquoted and stored at −80° C. for further use. Ad particle concentrations were determined by measuring the optical density at 260 nm and expressed as viral particles (VPs) per milliliter.

[0358] Adenoviral Genomic DNA Isolation from Virions—

[0359] For cloning of viral genomes, viral genomic DNA was extracted from purified particles by the addition of proteinase K, subsequent phenol-chloroform extraction, and ethanol precipitation. A detailed protocol for isolating viral genomic DNA is found in Example 7. To confirm the Ad type on genome level, multiplex PCR and sequencing were performed using the primer pair hexon-fwd (ATGGCCACCCCATCGATGATGC) and hexon-rev (TTATGTGGTGGCGTTGCCGGCC) amplifying the hexon regions of the viral genomes. To verify the end-sequence of the adenoviral genome for the following homologous recombineering step, primers reading into the ITR region were designed.

[0360] Plasmid Construction—

[0361] p15A-cm-MCS; p15A-amp-ccdB; pR6K-spect-adapter; pR6K-GLN; Linear-linear homologous recombination (LLHR)-mediated adenoviral genome cloning. Linear-circular homologous recombination (LCHR)-mediated adenovirus genome tagging.

[0362] PCR—

[0363] Homology arm (HA)-containing long primer-mediated PCR was performed with Phusion® High-Fidelity DNA Polymerase (New England Biolabs, Frankfurt, Germany) according to the manufacture's protocol. Notably, only the primer binding sequence (˜20 bp) was used for calculating the annealing temperature. The PCR product purified with the Wizard® SV Gel and PCR Clean-Up System (Promega, Mannheim, Germany) and eluted in ddH2O was used for electroporation. To check virus reconstitution and amplification, OneTaq® 2X Master Mix (New England Biolabs, Frankfurt, Germany) was used according to the manufacture's standard protocol.

[0364] NGS and Bioinformatics Analyses—

[0365] For sequencing of plasmids, 200 ng purified DNA was subjected to standard Illumina DNA library preparation. In brief, DNA was enzymatically sheared (NEBnext dsDNA Fragmentase, New England Biolabs). After XP bead purification (Beckman Coulter), ends were polished and A-tailed and universal adapters were ligated (Ultra Directional DNA Library Prep Kit, New England Biolabs). For adapter ligation, custom adaptors were used (Adaptor-Oligo 1: 5′-ACA-CTC-TTT-CCC-TAC-ACG-ACG-CTC-TTC-CGA-TCT-3′, Adaptor-Oligo 2: 5′-P-GAT-CGG-AAG-AGC-ACA-CGT-CTG-AAC-TCC-AGT-CAC-3′). After ligation, adapters were depleted by XP bead purification (Beckman Coulter). Sample indexing was done in the following PCR enrichment (15 cycles). For Illumina flow cell production, samples were equimolar pooled and distributed on two Illumina MiSeq flow cells for 300 bp paired-end sequencing. The Illumina TruSeq adapter and regions of low quality (phred quality <20) were trimmed with cutadapt requiring a minimum length of 50 bp. Trimmed reads were mapped with BWA onto the reference sequence of the vector and reads consisting entirely of vector sequence were discarded whereas reads without or with only partial vector sequence were kept. Each adenovirus dataset was assembled with IVA de novo as well using the respective GenBank sequence as anchor. The better assembly was chosen based on number of sequences, total length and presence of vector sequence at the flanks of the assembled sequence. The remaining vector sequence was identified with BLAT and removed with in-house Perl scripts and the final assembled sequence was orientated according to the respective GenBank reference sequence. Annotation of coding sequences (CDS) was done with Glimmer in two steps. First, known adenovirus CDS from the GenBank were compared to the assembled sequences using exonerate. The resulting alignments served as training set for Glimmer which then predicted the final CDS regions. Functional identification of CDS was based on BLASTP against known adenovirus protein sequences from GenBank. To align and visualize the adenovirus sequences obtained by NGS against their respective GenBank reference sequences, we used the zPicture program (webpage: http://zpicture.dcode.org/). Sequence alignments between adenovirus sequence and GenBank reference were done with BLASTZ. As cut-off value, we used a minimum sequence identity of 99% which minimizes false-positive alignments but still allows for studying single nucleotide variants between adenovirus sequences and respective GenBank references. Multiple sequence alignments for conserved E3 and ITR sequences were generated using clustal Omega (http://www.ebi.ac.uk/Tools/msa/clustalo/) with default parameters and for visualized extent of conservation in aligned sequence sets we used WebLogo (webpage: http://weblogo.berkeley.edu/logo.cgi).Plasmid DNA transfection and virus rescue—10 μg of the p15A-based adenovirus genome containing plasmids were either digested with a combination of two restriction enzymes (PmeI/Sbfl or PacI/SwaI) releasing the adenovirus backbone, or with the restriction enzyme I-SceI linearizing the p15A-based Ad genome. To purify and concentrate digested DNA, ethanol precipitation was performed for DNA digested with PmeI/Sbfl and PacI/SwaI, and for I-SceI digested DNA a phenol-chloroform extraction followed by ethanol precipitation was conducted.

[0366] A549 cells were plated in 6-well plates and at 50-80% confluency 3 μg of digested viral DNA was transfected using Superfect transfection Reagent (Qiagen) according to the manufacturer's protocol. After 24-48 hrs, when the cells grew to up to >90% confluency, the medium was changed to 2% FBS-supplemented DMEM. The cells were maintained for up to two weeks, until cytopathic effect (CPE) was observed. If no CPE was obtained, the cell/virus lysate was collected and ½ or ⅓ of the lysate was used to infect a new well of A549 cells at a confluency of 90-95%. To release the virus from infected cells, the crude lysate was subjected to three freeze/cycles in liquid nitrogen and in a 37° C. water bath. A small aliquot of cells was collected for qPCR analysis.

[0367] qPCR Analysis—

[0368] To monitor virus replication during rescue, quantitative real-time PCR (qPCR) was performed using the CFX96 Touch™ Real-Time PCR Detection System (Bio-Rad). Previously described primer pairs and probes (Damen, M et al, 2008, JoCM) binding to the hexon of Ad were used to determine the copy number of Ad genomes in infected cells. The PCR was based on the following program: pre-incubation/activation at 95° C. for 5 min, amplification and data collection during 40 cycles (95° C. for 15 s and 60° C. for 30 s). The Sso Fast™ Probes Supermix (Bio-Rad) was used for these PCRs.

[0369] Characterization of Tagged Ad In Vitro and In Vivo—

[0370] All reconstituted GLN-tagged viruses were confirmed by hexon-PCR of isolated adenoviral genomes. Adenovirus particle concentrations were determined by measuring the optical density at 260 nm and expressed as viral particles (vps) per millilitre.

[0371] Nano-Glo Luciferase Assay—

[0372] Individual tested cells were grown to confluence in 96-well tissue culture plate and infected with different viral partials (VPs) per cells. 26 h after infection NLuc activity was measured with the Nano-Glo assay system (Promega), and luminescence was detected with a plate reader (Tecan).

[0373] Genome Uptake Measured by Internalization Assay—

[0374] To quantify the cell entry efficiency, a defined number of Ad particles (vp) was used to infect pre-seeded tumor cells and incubated for 2 hours. Cell monolayers was digested and flushed off with trypsin, followed by extensive washing with PBS. Genomic DNA was extracted by incubation in TE buffer (10 mM Tris-HCl, 10 mM EDTA, pH 8.0) with 0.5% SDS and 0.5 mg/ml proteinase K. Subsequently a phenol-chloroform extraction and ethanol precipitation was performed. To monitor virus genome uptake efficiency, quantitative real-time PCR (qPCR) detecting the transgene (GLN gene cassette) was performed.

[0375] Oncolytic Assays with Most Promising Ad Candidates—

[0376] Oncolytic assay was performed in 24 well plates. A 10-fold dilution series of individual Ads was prepared freshly to infect pre-seeded cancer cells. Cytopathic effect (CPE) was checked daily until at least one of the viruses on one plate at the lowest dosage showed CPE or until maximal 14 days. The cells were first fixed with 3.7% formaldehyde then stained with crystal violet solution.

[0377] Statistics—

[0378] Statistical analyses were conducted with Microsoft Excel. Experimental differences were evaluated by a Student's one-tailed t-test assuming equal variance.

### Example 2—Gene Annotation

[0379] Genes were predicted using Gene Locator and Interpolated Markov ModelER (Glimmer)³⁸. For each sequenced genome, protein sequences of known genes of the respective reference from GenBank were aligned with exonerate³⁹ to the assembled genome sequence. The coordinates of the best hits were then used to build a Glimmer model which was subsequently used for prediction of location and orientation of genes in the sequenced genome.

[0380] Next, protein sequences were compared between virus genomes. The result of this analysis is given in FIG. 6. Shown are genome organisations for 28 sequenced human adenoviruses. Genes and their orientation are shown as gray-shaded shapes on both strands of the genome (solid line). All genomes show the canonical organization of the Mastadenovirus genus.

[0381] Shading of a gene reflects its maximum sequence divergence across all 28 viruses determined through an all-vs-all Blast analysis.

### Example 3—Cell Tropism of Human Adenovirus D17

[0382] A new first generation adenovirus based on human adenovirus D17 was constructed and labelled with a green fluorescent protein (GFP) marker using the recombineering technology described in Example 1. The early E1 gene was deleted in the HAdV17 vector, and a corresponding E1-deleted, GFP-labeled HAdV5 vector was constructed for comparison.

[0383] Viruses were rescued in complementary E1-expressing stable cell lines, and then screened against a panel of different cell lines by fluorescence activated cell sorting (FACS) analysis and quantitative PCR. HAdV17 was found to have a tropism for endothelial cells, whereas endothelial cells are normally refractory to HAdV5 infection. This finding was further verified using primary human umbilical vein endothelial cells (HUVEC).

[0384] Competition assays based on soluble recombinant fiber knob blocking reagents^{40, 17} (5knob, 17knob, JO4, Augmab) were used to characterize the receptor interaction with these vectors in vitro. It was found that HAdV17 could utilize both CD46 (a membrane cofactor protein which is expressed on all nucleated cells) and CAR (coxsackievirus and adenovirus receptor) as cell attachment receptors. The endothelial cell tropism was CD46-dependent and could be blocked by the CD46 blocking reagent Augmab.

[0385] In vivo biodistribution analyses were performed after intravenous injection of recombinant viruses into both normal and CD46-transgenic mice. These studies showed significantly increased vector genome copies (VCN) in various organs of CD46-transgenic mice compared to normal mice, indicating the involvement of CD46 as a receptor. These results were confirmed by quantitative PCR (qPCR) and immunohistology analysis.

[0386] Neutralising antibody assays revealed that there was less seroprevalence with HAdV17 compared to HAdV5 in humans.

[0387] Accordingly, HAdV17-based vectors, which can use both hCAR and CD46 as receptors and display an endothelial cell tropism, hold great promise for gene therapy in endothelial disease.

[0388] See also FIGS. 11-19.

### Example 4—Delivery of all Components of the CRISPR/Cas9 System Using High-Capacity Adenoviral Vectors

[0389] A new CRISPR/Cas9 shuttle plasmid toolbox was generated, containing the Cas9 nuclease gene, either utilising a constitutive or an inducible promoter, and a gRNA expression unit. The toolbox allows cloning or recombining of all CRISPR/Cas9 components into the HCAdV genome in one step. To use several gRNA expression units for multiplexing the CRISPR/Cas9 system, further gRNA expression units can be easily included. To enable fast assembly of recombinant CRISPR-HCAdV genomes, DNA recombineering was used to introduce all CRISPR/Cas9 expression units into the HCAdV genome contained in the bacterial artificial chromosome pBHCA. For insertion of multiple gRNA expression units into the HCAdV genome, the established pAdV-FTC plasmid was used in concert with homing endonuclease directed cloning. CRISPR-HCAdVs were produced using a shortened amplification and purification procedure.

[0390] The toolbox was used to produce several CRISPR-HCAdVs carrying single and multiplex gRNA units specific for different targets including hCCR5, hDMD, and HPV16- and HPV18-E6 genes, yielding sufficient titers within a short time. T7E1 assays⁴¹ were applied to prove CRISPR/Cas9-mediated cleavage of respective targets. Infection of cultured human cells with respective CRISPR-HCAdVs resulted in efficient site-specific gene editing.

[0391] In summary, this new platform enables customisation, cloning and production of CRISPR-HCAdV vectors for single or multiplex approaches within a short time. It simplifies the delivery of the CRISPR/Cas9 machinery by only using one single viral vector. Inducible Cas9 expression helps to avoid targeting of the genome of producer cell lines during vector production and may be beneficial for special approaches where constitutive expression is unwanted.

### Example 5—Enhanced Oncolytic Activity Mediated by a Novel Human Adenovirus Type 6-Based Vector

[0392] Most existing oncolytic adenoviruses (AdV) are based on human AdV type 5 (hAdV-5). Clinical efficacy of hAdV-5 based oncolytic viruses is limited by variable expression levels of coxsackie- and adenovirus receptor (CAR) in different tumour cells, and insufficient replication rates. Additionally, high prevalence of neutralising antibodies against hAdV-5, resulting in lower efficiency, makes hAdV-5 a less suitable candidate for systemic application. Recent studies have highlighted human adenovirus type 6 (hAdV-6) as a promising candidate for oncolytic and vaccine vectors. Thus, development of novel oncolytic AdV based on hAdV-6 may help to overcome these limitations. Oncolytic efficacy of the candidate virus can be augmented by expression of RNAi suppressor protein P19, as has been shown previously for hAdV-5³¹. In this example, a novel hAdV-6-based, p19-containing oncolytic AdV was evaluated as a candidate for oncolytic applications in different tumour cell lines.

[0393] A P19-containing hAdV-6 based virus (hAdV-6FP19) was cloned by a novel seamless recombineering technique (see Example 1). In order to allow P19 expression from the adenoviral vector genome, the P19 cDNA was fused via an internal ribosome entry site (IRES) to the late fiber gene. After release of the respective recombinant adenoviral genomes from plasmids containing the complete DNA molecule, linearised viral DNA was transfected into HEK 293 cells for virus reconstitution. After initial amplification steps which were monitored by virus specific PCRs, upscaling and virus purification using cesium chloride density gradient ultracentrifugation was performed. Rescue and amplification efficiencies were comparable to commonly used hAdV-5 based vectors.

[0394] Various cancer cell lines from different origin were used to perform oncolysis assays. These included: A549 (lung carcinoma), HCT 116 (colon carcinoma), HeLa (cervical carcinoma) and Huh7 (hepatocellular carcinoma). Cells were infected with hAdV-6FP19, hAdV-6 and hAdV-5 at various multiplicities of infection (MOI). Two to three days after infection, cells were fixed and stained with methylene blue. Significantly higher cell lysis (up to 100-fold) was observed for hAdV-6FP19-infected cells as compared to hAdV-5 and 6 at identical MOIs. Higher cell lysis rates for hAdV-6FP19 compared to wildtype virus were present in all evaluated cell lines, suggesting significantly enhanced oncolytic potential for hAdV-6FP19. In summary, hAdV6-based vectors hold great promise for oncolytic applications and their oncolytic effectiveness can be further improved by RNAi suppression.

### Example 6—High Throughput Screening (HTS) of Adenovirus Library as a Novel Resource for Disease-Specific Targeting

[0395] To fully explore our cloned Ad library as a resource for developing of novel translational approaches, the library was further tested on a panel of cell lines using an HTS approach. Cell lines originating from different cell types were infected with the reporter-labelled virus types of the Ad library. Transduction efficiencies measured by luciferase expression levels were compared to the commonly used adenoviral vector type 5 (Ad5). Initial screening revealed that species B adenoviruses have high transduction efficiencies in epithelial (A549, HCT 116, ARPE-19) and endothelial (EA.hy926) cells. While in the liver originated cell lines SK-HEP-1 and Huh-7, the common used vector type 5 (Ad5) highest infection efficiencies (FIG. 20). Also included was an osteosarcoma derived cell line (MG-63) and the breast cancer-derived cell line Hs 578T derived form a triple-negative breast cancer (TNBC). In the TNBC 207 cell line, Ad37 was identified as the most efficient Ad type, while other species B types (Ad16, 50 and 35) revealed improved efficiency compared to the commonly used Ad5 (FIG. 20). After performing HTS on osteosarcoma derived MG-63 cells, it was discovered that Ad21 showed highest transduction efficiencies (FIG. 20).

[0396] Therefore, Ad21 was further pursued as a potential oncolytic agent to treat osteosarcoma, because this type of cancer is the most frequent primary cancer of bone which predominantly occurring in the second decade of life. Regarding the age group from 15-19 years, osteosarcomas represent >10% of all solid cancers. Therefore, a panel of osteosarcoma cell lines with different grading related features, including Saos-2 and U-2 OS cells, was further examined.

[0397] As displayed in FIG. 21a and in concordance with results obtained in MG-63 cells (FIG. 20), Ad21 was identified as a promising alternative Ad type to transduce osteosarcoma cell lines, which was also confirmed by GFP also expressed form the tagged Ads (FIG. 21b) and by virus internalization assays measuring uptake of virus genomes 3 hrs post-infection (FIG. 21c). The oncolytic potency of selected Ad types was analysed in all three osteosarcoma cells and it was found that Ad21 consistently resulted in efficient oncolysis of respective cell lines at different MOIs tested (FIG. 21d). To show that oncolytic potential varied between different cancer cell lines we also tested the tagged Ad library on lung carcinoma derived A549 cells revealing that in contrast to osteosarcoma cell lines, Ad35 and -69 showed highest oncolytic potency (FIG. 22). This proof-of principle experiment demonstrates that a novel virus candidate for disease specific targeting can be identified by HTS allowing development of novel therapeutic agents in further steps.

[0398] Using the same methodology, FIG. 23 shows the high infectivity rates of the Ad5, Ad21 and Ad37 adenoviruses in the glioblastoma derived cell-line RG2 [D74]. This indicates that adenoviral vectors derived from these adenovirus types would be effective in targeting glioblastoma cells.

### Example 7—Protocol to Isolate Adenoviral Genomic DNA for Use in the Cloning Step

[0399] 1. Incubate certain volume of purified virus for 2 hours (or overnight) with proteinase K-SDS solution pH 7.5-8 (TE buffer, 0.5% SDS, 100˜500 μg/ml proteinase K) at 56° C., with low speed shake (300 rpm).
2. Add equal volume mixture of phenol:chloroform:isoamyl alcohol (25:24:1) to the sample from step 1. In doing this, go inside to the mixture, and do not take the surface layer. To increase the recovery rate, use a phase lock gel tube (Phase Lock Gel Heavy 1.5 ml, https://uk.vwr.com/store/product/826754/phase-lock-gel)
3. Centrifuge for 5 min at full speed (15,000 g) at room temperature in a microcentrifuge and then transfer the aqueous phases to another clean eppendorf tubes.
4. Precipitate viral DNA by adding 1/10 volume of 3 M sodium acetate (pH 5), 2 μg glycogen and 2.5˜3 times of precooled EtOH (99.8%; stored at −20° C.). Mix gently by inverting the tube several times). To increase the recovery rate, put the mixture in −20° C. for 30 mins.
5. Centrifuge for 10 min at full speed (15,000 g) at room temperature in a microcentrifuge and discard the supernatant by pipetting.
6. Add 600 μl of 70% ethanol and mix gently by inverting the tube several times. After centrifugation at 15,000 g at room temperature for 5 min, remove the supernatant by pipetting.
7. Repeat step 6
8. Air-dry the DNA pellet briefly and resuspend in 20˜50 μl of sterilized dH2O low speed shake (300 rpm) at room temperature for 15 mins.

[0400] In this protocol, which is provided by way of example, it is important that the large genomic DNA is never vortexed or vigorously pipetted during isolation.

### REFERENCES

[0401] ¹ Aiuti, A. et al. Lentiviral hematopoietic stem cell gene therapy in patients with Wiskott-Aldrich syndrome. Science 341, 1233151, (2013).
[0402] ² Nathwani, A. C. et al. Adenovirus-associated virus vector-mediated gene transfer in hemophilia B. The New England journal of medicine 365, 2357-2365, (2011).
[0403] ³ Biffi, A. et al. Lentiviral hematopoietic stem cell gene therapy benefits metachromatic leukodystrophy. Science 341, 1233158, (2013).
[0404] ⁴ Wiley, J. M. Gene Therapy Clinical Trials Worldwide. J. Gene Med., (2015).
[0405] ⁵ Crystal, R. G. Adenovirus: the first effective in vivo gene delivery vector. Human gene therapy 25, 3-11, (2014).
[0406] ⁶ Zabner, J. et al. Adenovirus-mediated gene transfer transiently corrects the chloride transport defect in nasal epithelia of patients with cystic fibrosis. Cell 75, 207-216 (1993).
[0407] ⁷ Wilson, J. M. Gendicine: the first commercial gene therapy product. Human gene therapy 16, 1014-1015, (2005).
[0408] ⁸ Kaufman, H. L., Kohlhapp, F. J. & Zloza, A. Oncolytic viruses: a new class of immunotherapy drugs. Nature reviews. Drug discovery 14, 642-662, (2015).
[0409] ⁹ Hage, E. et al. Human Adenovirus type 70: A novel, multiple recombinant species D adenovirus isolated from diarrheal faeces of a haematopoietic stem cell transplantation recipient. J. Gen. Virol. 96, 2734-2742, (2015).
[0410] ¹⁰ Davison, A. J., et al. Genetic content and evolution of adenoviruses. J. Gen. Virol. 84, 2895-2908, (2003).
[0411] ¹¹ Fu, J. et al. Full-length RecE enhances linear-linear homologous recombination and facilitates direct cloning for bioprospecting. Nature biotech. 30, 440-446, (2012).
[0412] ¹² Wang, H. et al. Improved seamless mutagenesis by recombineering using ccdB for counterselection. Nucleic acids research 42, e37, (2014).
[0413] ¹³ Harrach, B. et al. Adenoviridae. In “Virus Taxonomy” (ed. King, A. M. Q., Adams, M. J., Carstens, E. B. and Lefkowitz, E. J.), 125-141 (Elsevier, 2011).
[0414] ¹⁴ Bradley, R R. et al. Adenovirus serotype 5 neutralizing antibodies target both hexon and fiber following vaccination and natural infection. J. Virol. 86, 625-629, (2012)
[0415] ¹⁵ Zhang, Y. and Bergelson, J. M. Adenovirus receptors. J. Virol. 79, 12125-12131, (2005).
[0416] ¹⁶ Ghebremedhin, B. Human adenovirus: viral pathogen with increasing importance. Eur. J. Microbiol. Immunol. 4, 26-33, (2014).
[0417] ¹⁷ Wang, H. et al. Desmoglein 2 is a receptor for adenovirus serotypes 3, 7, 11 and 14. Nat. Med. 17, 96-105, (2011)
[0418] ¹⁸ Tuve, S. et al. A new group B adenovirus receptor is expressed at high levels on human stem and tumor cells. J. Virol. 80, 12109-12120, (2006).
[0419] ¹⁹ Danthinne, X. and Imperiale, M J. Production of first generation adenovirus vectors: a review. Gene Ther. 7, 1707-1714, (2000).
[0420] ²⁰ WO 2011/154927
[0421] ²¹ Cong, L. et al. Multiplex Genome Engineering using CRISPR/Cas Systems. Science 15, 819-823, (2013).
[0422] ²² Li, X. et al. PiggyBac transposase tools for genome engineering. Proc. Nat. Acad. Sci. USA 110, E2279-E2287, (2013).
[0423] ²³ Hausl, M. et al. Development of Adenovirus Hybrid Vectors for Sleeping Beauty Transposition in Large Mammals. Curr. Gene Ther. 11, 363-374, (2011).
[0424] ²⁴ Penaloza-MacMaster, P. Alternative serotype adenovirus vaccine vectors elicit memory T cells with enhanced anamnestic capacity compared to Ad5 vectors. J. Virol. 87, 1373-1384, (2013).
[0425] ²⁵ Wold, W. S. M. and Toth, K. Adenovirus vectors for gene therapy, vaccination and cancer gene therapy. Curr. Gene Ther. 13, 421-433 (2013).
[0426] ²⁶ Barouch, D. H. Novel adenovirus vector-based vaccines for HIV-1. Curr. Opin. HIV AIDS 5, 386-390, (2010)
[0427] ²⁷ Geisbert, T. W. et al. Recombinant adenovirus serotype 26 (Ad26) and Ad35 vaccine vectors bypass immunity to Ad5 and protect nonhuman primates against Ebolavirus challenge. J. Virol. 85, 4222-4233, (2011).
[0428] ²⁸ Barnes, E. et al. Novel adenovirus-based vaccines induce broad and sustained T cell responses to HCV in man. Sci. Transl. Med. 4, 115ra1, (2012)
[0429] ²⁹ Yamamoto, M. and Curiel, D. T. Current issues and future directions of oncolytic adenoviruses. Mol Ther. 18, 243-250, (2010).
[0430] ³⁰ Cheong, S. C. et al. E1A-expressing adenoviral E3B mutants act synergistically with chemotherapeutics in immunocompetent tumor models. Cancer Gene Ther. 15, 40-50, (2008).
[0431] ³¹ Rauschhuber, C. et al. RNAi suppressor P19 can be broadly exploited for enhanced adenovirus replication and microRNA knockdown experiments. Sci. rep. 3, 1363 (2013).
[0432] ³² Rodriguez, R. et al. Prostate attenuated replication competent adenovirus (ARCA) CN706: a selective cytotoxic for prostate-specific antigen-positive prostate cancer cells. Cancer Res. 57, 2559-2563, (1997).
[0433] ³³ Cody, J. J. and Douglas, J. T. Armed replicating adenoviruses for cancer virotherapy. Cancer Gene Ther. 16, 473-488, (2009).
[0434] ³⁴ Green, N. K. et al. Extended plasma circulation time and decreased toxicity of polymer-coated adenovirus. Gene Ther. 11, 1256-1263, (2004).
[0435] ³⁵ Doronin, K. et al. Chemical modification with high molecular weight polyethylene glycol reduces transduction of hepatocytes and increases efficacy of intravenously delivered oncolytic adenoviruses. Hum. Gene Ther. 20, 975-988, (2009).
[0436] ³⁶ WO 2009/104094
[0437] ³⁷ Wang, H. et al. Improved seamless mutagenesis by recombineering using ccdB for counterselection. Nucleic Acids Res. 42, e37, (2014)
[0438] ³⁸ Salzberg, S. L. et al. Microbial gene identification using interpolated Markov models. Nucleic Acids Research 26, 544-548, (1998)
[0439] ³⁹ Slater, G. and Birney, E. Automated generation of heuristics for biological sequence comparison. BMC Bioinformatics 6, 31, (2005)
[0440] ⁴⁰ Gaggar, A. et al. CD46 is a cellular receptor for group B adenoviruses. Nat. Med. 9, 1408-1412 (2003).
[0441] ⁴¹ Mashal R. D. et al. Detection of mutations by cleavage of DNA heteroduplexes with bacteriophage resolvases. Nat. Genet. 9, 177-183, (1995).

The application's sequence listing, which the Patent Office published only in electronic form, follows.

SEQUENCE LISTING (1447 sequences)

SEQ ID NO: 1 - DNA, 34376 bp, Adenovirus A12
  MISC_FEATURE (1)..(34376): Complete Genome
ctgcaggttaattaaggaagggcgaattctgcagatatccatcacactggcggccgctcgagcatgcatctagagggcccaattcgccctatagtgagtcgtattacaattcactggcccctatctaataatataccttatactggactagtgccaatattaaaatgaagtgggcgtagtgtgtaatttgattgggtggaggtgtggctttggcgtgcttgtaagtttgggcggatgaggaagtggggcgcggcgtgggagccgggcgcgccggatgtgacgttttagacgccattttacacggaaatgatgttttttgggcgttgtttgtgcaaattttgtgttttaggcgcgaaaactgaaatgcggaagtgaaaattgatgacggcaattttattataggcgcggaatatttaccgagggcagagtgaactctgagcctctacgtgtgggtttcgatacgtgagcgacggggaaactccacgttggcgctcaaagggcgcgtttattgttctgtcagctgatcgtttgggtatttaatgccgccgtgttcgtcaagaggccactcttgagtgccagcgagaagagttttctctgccagctcattttcacggcgccattatgagaactgaaatgactcccttggtcctgtcgtatcaggaagctgacgacatattggagcatttggtggacaacttttttaacgaggtacccagtgatgatgatctttatgttccgtctctttacgaactgtatgatcttgatgtggagtctgccggtgaagataataatgaacaggcggtgaatgagttttttcccgaatcgcttattttagctgccagtgaggggttgtttttaccggagcctcctgtactttctcctgtctgtgagcctattgggggcgaatgtatgccacaacggcaccctgaagatatggatttattgtgctacgagatgggctttccctgtagcgattcggaagacgagcaagacgagaacggaatggcgcatgtttctgcatccgcagctgctgctgccgctgatagggaacgtgaggagtttcagttagaccatccagagttgcccggacacaattgtaagtcctgtgagcaccaccggaatagtactggaaatactgacttaatgtgctctttgtgctatctgcgagcctacaacatgttcatttacagtaagtgtgctatgggaggtgggaggtgatttttttttcttaagcagtgaaaaataatattttgttgtttttaggtcctgtttccgataatgagcctgaacctaatagcactttggatggcgatgagcgaccctcacccccgaaactaggaagtgcggttccagaaggagtaataaaacctgtgcctcagcgggtgactgggaggcgtagatgtgctgtggaaagcattttggatttgattcaagaggaagaaagagaacaaacagtgcctgttgatctgtcagtgaaacgccctagatgtaattaatggactttgagcacctgggcaataaaataggggtaatgtggtttttgtgagtcatgtataataaaactggtttcggttgaagtgtcttgttaatgtttgtttgggcgtggttaaacagggatataaagctgggttggtgttgctttgaatagttcatcttagtaatggagttggaaactgtgctgcaaagttttcagagcgttcgccagctcttgcagtatacctctaaaaacacttcaggtttttggaggtatctgtttggctctaccttaagcaaggtggtaaatagggtgaaagaagactatagagaggaatttgaaaacatattggccgactgtccagggcttttggcttcactagacctttgttaccacttggtgtttcaggaaaaagtggtcagatccttagatttttcatctgtgggacgaacggttgcttctattgcttttttggcaaccatattggataaatggagcgagaaatcccacctgagttgggattacatgctggattacatgtcaatgcagctgtggagggcatggctgaagaggagggtttgcatttactcgctggcgcggcctttgaccatgccgccgctgccgacgttgcaagaggagaaggaggaggagcggaaccctgcggtggtggagaagtaaacatggaacaacaggtgcaagaaggccatgtacttgactctggcgaagggcctagttgcgcagatgatagagataagcaggaaaaaaaagaaagtttaaaggaagctgctgttcttagtaggctaactgttaatctgatgtcccgcccgcgtttggaaactgtatattggcaggagttgcaggatgaatttcagcggggtgatatgcatttacagtacaaatacagttttgaacaattaaaaacccactggttagagccatgggaggatatggagtgtgctattaaagcttttgctaaattggccttacgtcctgattgtagctacagaattactaaaacagtaaccattacttcatgcgcctatattataggtaacggggcaatagttgaggtagatacaagcgacagagttgcttttagatgtcgaatgcagggtatgggcccaggggtggtgggtttggatggaattacatttataaatgttaggtttgctggagataagtttaaaggcattatgttcgaagctaatacctgtcttgtcttgcatggtgtttactttcttaactttagtaacatttgtgtagagtcttggaataaggtttctgctaggggctgtactttttatggatgttggaagggtttggtgggtagaccaaaaagtaaactgtctgtaaaaaagtgtttgtttgaaaaatgtgtacttgctttaattgtagagggggatgcacatattaggcataatgcagcttcagaaaatgcctgttttgtattattgaagggaatggctattttaaagcataatatggtttgtggggtgtctgatcaaactatgcgacgttttgttacctgtgctgatggaaattgtcataccttaaaaactgttcatattgtgagccacagtagacattgttggcctgtatgtgatcataacatgtttatgcgctgtaccatacatttaggcttaaggcggggtatgtttagaccttcccaatgtaacttcagccactcaaacattatgctggaacctgaagtgttttctagagtgtgtttaaatggggtatttgatttatctgtggaattatgtaaggttataagatataatgatgatactcgacatcgttgccgacagtgtgagtgtggtagcagtcatctagaacttcgtcccattgtgctaaatgtaactgaggagctgagaagtgaccaccttaccctgtcttgcctgcggactgactatgagtcaagtgatgaagacgacaactgaggtaagtgggtggagctaggtgggattataaaaggctggaagtcaactaaaaattgtttttgttcttttaacagcacgatgaacggaactactcagaacaacgctgcgctttttgatggaggggtttttagcccttatttgacttccaggttaccatattgggccggagtacgtcagaatgtggtaggatctacagtggacggtcgacctgtggcacctgcaaattcatcaacattaacctatgcaactattggaccctcgcctttggataccgccgccgccgctgcagcttccgcggccgcttctacggctcgcagtatggcagctgatttcagcttctacaatcacttggcttcgaatgctgtgacacgcaccgcagttcgagaggacattctgactgttatgcttgccaagcttgaaactctaactgctcagctggaagagctatcgcaaaaggttgaggaattagctgatgctactacccataccccagcccaacctgtaacccaataaagaaaaaacttaaattgagatggtgttatgaatctttattgatacttgttttttctgacatggtaagctcttgaccaccgttccctatcattaagaacacggtgaatgtgttccagtattttgtaaagatgagcctgtatattaaggtacattggcattaggccatctttgggatgaaggtaggaccattgaagggcttcatgttccgggttagtgttgtagataatccagtcatagcaacaacgctgggcatggtgattaaatatatcttttaacaacaagctaattgctaatggaagacctttagtataggtattgataaaacggttaagctgggtgggatgcatccgaggtgacatgatatgaagttttgattgtattttgagattggcaatgttacctgccaaatctcttcttggattcatattgtggagaaccacgaaaacggtgtagccagtacacttgggaaatttgtcatggagtttagaaggaaaggcatggaaaaacttggaaacgcctttgtgacttcccaaattttccatacactcatccattattatggcaattggaccgcgagcagcggcttgagcaaaaatgttttctggatcagaaacatcatagttgtggtctagagttaggtcatcgtaggacaacttaacaaatttaggacacagcgttccagattgtggaataatagttccctctggtcctgggacataatttccctcacaaatttgcatttcccaagatttaatttcagatgggggaatcatgtccacttgcggaacaataaaaaaaacagtttctggagcaggtgtaaccagctgggcagaaagcaaattacgcaacaactgagacttcccacagccagtgggtccataaattaccccaattacaggttgcaagtgatagtttaacgaggtgcagctgccgtcttcgtggagaagcggagccacttcattcatcatttgtcggacgcggatgttttgcttggccagttcccctaacagacgctctccgcctaaggaaagtaactcttgtaaagatttgaaatttttaagtggctttaggccatcggccataggcatgtggtccagggtttgcttcagcagttgcaagcgatcccatagctcagttatattttctatgccatctcgatccagcaaacttcctcgttgcgggggtttggctggctgttgctgtaaggaacgaggcggtgagcatccaaatggacgagggttttgtccttccagggacgtaatgtgcgcgtcagggttgtttcggtcacggtgaatggatgcgctcctggttgagcgctggccagtgtgcgctttaaactgaggcggctggtgctgaagcgcgtgtcttctccctgtgcttcggcaaggtagcattttaacataagatcataagacaaagcctctgtagcgtggcctttagcccgtatttttcctttggaggtgctcccgcagtgaggacactgaaggcatttaagggcgtacagttttggagccaaaaaaacagattctggagaataagcatctgcgccacaataactacaaacagtttcacattcaactgaccaggtcagctcaggacatgatggatcaaaaacaagtttccctccgtactttttgatgcgtttcttaccttgcgactccataaggcggcgtcctttctctgtgacaaaaagactgtcagtgtctccgtatacagatttaaggggtctatccttcagtggtattccgcggtcctcctcgtacaggaattctgaccactctgacacaaaagctctagtccaagcaagtacaaaggaagccacatgggaagggtaccgatcgttgttaattaaagggttagaactttctaaggtgtgtaaacacatgtctccttcttcagcgtccatgaatgtgattggtttgtaggtgtaagtcacgtgttcacaattttctggtggtgggctataaaaaggggcgggtccttggtcttcatcgctttcttctgcttcgctgtttacgagcgccaactggttgggtgagtacacgcgctcaaaggcaggcattacctctgtactcaacgtgtcagtttctataaacgatgaggatttgatgtttaatcgccccgctgcaatttctttcattaggctttcttccatttgatcagaaaaaactatttttttgttatctagtttggtagcaaaagatccgtacaaggcattggaaagcagcttggctatagatcttagggtttgatttttgtccctatcggcccgttcttttgcggcaatattgagttgcacatattcgcgtgccaggcatttccaggtggggaaaatggtggtgcgctcgtcagatagcaagcgtaagcgccacccgcgattatgcagtgtaaccagatctacgctggtaactacttcaccgcgcaagctttcattggtccaggctaaacgaccgccttttctagaacaaaaaggaggaagaacatccaactgattttcatctggggggtcggcatctatagtaaaaatgccaggacaaagatttttgtcaaaataatcaattttgcaagtgtaattttccagcgccacctgccattgccgcacggccaatgcccgctcataggggttaaggggaggaccccaaggcatggggtgtgtgagggccgatgcatacatgccgcaaatatcatatacatatatgggctcttttagtactcctatgtaagtaggatagcacctgccgccacgaatgctggcgcgaacgtagtcatatagctcatgtgaaggcgccaggatgttgggcccaagatgtgtgcgctgtggtttttcggcgcggtacaaaatttgtctgaaaattgcatgagagttagaggaaatggtaggacgctgaaacacattaaaatgtgccgcgtcaagacccactgcgtcagtaacaaactgggcgtatgagctacgcagtttttctaccaatgaggcagtcacaagtacatccagggcacaatagtttaatgtttccccgataagattgtaatttttttctcctttttttttccatagttcttgatttaggaggtattcctccttatccttccagtactcctccaggggaaacccatttgcatctgcacggtaagaaccaagcatataaaactgatttaccgccttgtacggacaacatcctttttctacaggcagggcatacgcttgtgcagcctttcttaaagatgtatgagtaagagcaaaggtatctctgaccattacttttaaatactggtatttaaaatcttggtcgtcacaccctccgtgttcccacagtaggaagttagttcgctttttgtagtggggattgggaagggcaaaagtaatatcattaaataatattttgccagctcttggaataaaatttctagaaattttaaagggtccagggacgtccaagcggttattgattacctgagcggcaagaacaatttcatcaaatccattaatattgtgtcctactatatacaactctacaaatcttggctcacccttaattgcaggggctcttttaagatcttcgtaggaaagatcttcaagcgcgactagtccgttttcttcttgagcccattgagacaagtgtggatttttttgtaaaaaagtcatccaaagatcagtagctaaggaggtttgtaagcggtttctataggtacgaaactgttgaccgaccttcattttttctggggttaagcagtagaaagtagtagagtctttttcccattggtcccatccaagttctaatgcaagttgtaaggcatgtttgacaagattgtcatccccagacagtttcatcaccagcataaatgggacaagttgctttccaaatgcccccatccaggtgtaggtttctacatcataggtaataaaaaggcgctcagtgcgaggatgcgaaccgattgggaaaaagtggatctcctgccaccagttggaagaatggctgttgatgtgatgaaagtagaaatctcgtcggcggacagagcattcatgctgatgtttgtaaaagcgtgcgcagtgttcgcatcgttgcacgggctgtatctgttgaatgaggtgtacctggcggcctcgcaccagaaagcagatgggaaaatcaataccacttggcagctgccgttcgtcctcttcctcttctgctgcattgccactaccgtttggatcctcgaaagcgagaacggagagggtgacggtgcccctcgagctgcatgtccagatttcagcacgagaggggcggaaacgggaaatcagggcgtacagcctggagctgtccatggtatcagtcagagagaaaagcatgtccgcggggacagcgcgcaagttgacttcgcacaggcgggtaagagcaggctggaggtgcaggtaatacttaatttctagaggcgtgccgttggcagagtctattgcgtgaagtattccatgagcccggggactaaccacggttccacggtgcacttttccaatgcgcctgcttaaaatcggcggcgcggacgagctcccggaggaagcggcggttcgggtcctgcgggaagcgggggaagcggtatgtcggcctgacgctctggcaggggaaggtgttgagcccgaagttgactggcatgggcgactacccggcgattgatatcttgaatctgtcggcgttgtgtaaacactaccggccctgttgttttgaacctgaaagaaagttcaacagaatcaatctcagtgtcatttactgcagcctgtcttaaaatctcctgaacgtcgcctgagttatcttggtaggcaatttctgccattaattgatcaatttcttcctcctggaggtctccatgtcccgcacgttcaatagtggctgcaaggtcattagatatccgactcataagctgtgaaaatgcgtttagtccaatttcgttccagactcggctgtatactacccctccttcgctgtcccgagcgcgcataaccacttgcgccaagttgagttccacgagccgtgcgaacacgccgtagttgcgcaagcgctgaaacaggtagtttaaggtggtggcaacgtgttctgagacgaagaaatacagaatccaccgacgaagcgtcagctcgttgatgtcacctaaggcttcaagacgttccatggcttcgtaaaagtctactgcaaaattgaaaaactgggagttgcgagctgccaccgtcaattcttcttccaacagacgaataagctcggccaccgtctcgcgcacttcttgctgaaatgcgcccggaactatttcttgttcttcctcttctacctccattatttcttcctcgaccacaggtggtgggggttgtcttcttcgacgccggcgaacgggcagcctgtctacaaatctttcaatcatttcgccgcgacggcggcgcatagtttcggttactgctcgaccgttttcacgtggtcgtaactcaaaaactccacctctaagttctgtttcatgtaaaatgggaaatgaggcgttgcgaggggcgttaggtagggatacagcgctgattatgcattttattatttgctgcgtaggaactccgcgcaaggagctaagcgtctgcatatccaccgggtcggagaacctttcaagaaaggcatctagccagtcacagtcacaaggtaggctaagttttgtttcttctaaagtaccaggaagctgagcaatgctactaataatgtaattgaagtaagctgttttaagcccacgaatggttttaagaagcaccacatctttgggtccggcttgttgaattcgcaggcggtctgccattccccacacgtcactttgacatcgtccaagatctttgtagtagtcttgcattaacctttccacctctacctcgcggtttccgcgatcagccatgtgcgtgcttccgtagccttgcagcggttgtaataaagctaaatctgccactacccgttccgcaagcactgcctgttgaatttgggtaagggtggttgcaaagtcatccacatctacaaagcggtgataagctcctgcattaatggtgtagctgcagtttgtcattactgaccaattaacagtttgcgtgcctggctgtacagtttctgtgtatcgcaagcgtgagtaagcccgagagtcaaaaacatagtcattgcaggtgcgcactaggtattgatagcccacaaggaaatgaggaggaggttcgcgatacaacggccagccaagcgtagccgcagcacctggagcgagatcttccaacatgaggcggtggtattcatatatgtatctggacatccatgtgatgccggcagcggtagttgttgctcgcataaattcgcgggctcggttccaaatattgcgcaggggtaaaaagcgttcaatagttgccacgctttgaccggtcaggcgtgcgcagtcttgaatgctctggacatggaaaaaatgaaagttggtaagcgactcccttccgtggtttggtggaaaagtcacaagggtaccatagcgaggaaccccggttcgaaaccggcaggatccgctatgagcacaagtgaggcgcttgcgcgttgaacccggccaaggacccccagacacggagaggagtctttttttatttattttttcttagatgcatcctgtcctgcgacaaatgcgacctcagcccagggcaaccacggcctcagcagcggtggcgctttcgggctctggcgaacaggaagagcctcaatgtcctacattggagttggaagaaggagaaggcatagcccgattgggcgcccactctcctgagcgtcacccaagggtgcagctcgcccgggacagtcgcgtggcatttgtgcctcgtcagaacatgtttcgcgacaacagcggggaggaagctgaggaaatgcgagactgcaggtttagggccggtcgcgagctgcgccgcggatttaatcgcgagcgactgctgcgtgaggaggactttgagccagatgaacattcggggattagttctgcacgggcccatgtatcagcagccaacttagtaacagcatatgaacaaacggttacagaggaacgtaactttcaaaaaagctttaataaccatgtgcgcacactaatagcgcgagaagaagtagccattggtttaatgcatctttgggactttgtagaagcttatgtacataatccagcaagtaaacccctaactgcccagctgttcttaatagttcaacatagtagagacaatgaaacttttagggatgcaatgcttaacatagctgaaccccagggtcggtggttactcgatttaattaacattctgcagagcattgtggttcaggaacgcagtcttagtttggcagacaaggtggccgccattaattactccatgttaagtttgggaaagttttatgctcgtaaaatctacaaaagtccgtatgttcccattgacaaggaagtgaagatagacagcttttatatgcgcatggctttaaaggtactaacattaagcgacgatcttggagtgtaccgcaatgaccgaatccacaaagcagtaagcgccagtcgccgcagagagctaagcgacaaagagcttatgcatagcttacaaagggcgctgacgggagcaggaacagaggacgagtcgttctttgatatgggcgcagacctacggtggcagccaagcgctcgcgctttggaggcagctggagtggcgtctgctgacgtcactggcgatgacgatgacgaagaccagtacgaggactgatcggccgtaccttttgttagatgcagcgaccggcgatcatcgcggagagggctcctaacctggatcccgcggttttggcggccatgcaaagccagccttctggcgttacagcttcagatgactggacagcggccatggatcgtattatggctttaacggcgcgcagtcctgatgcttttcgccagcagccccaagctaaccgcttttcggccattttggaagcagtagtgccgtctcgtactaaccctactcacgagaaagtgttaaccattgtaaatgctttgttggatagcaaagccatccgcaaagatgaggctggtttaatatacaacgctttgcttgagcgcgtggcacgctataacagtaccaatgtgcaggctaacttagaccggatgggtacagatgtaaaggaggcgctggctcaacgagagcgctttcatcgcgatggtaatcttggttcgctagtagcattaaacgcttttttgagtactcagccggctaatgttccgcgtggtcaggaagattatacaaacttcatcagcgccttgcgactaatggttactgaagtgcctcaaagtgaagtgtatcagtctggacccgattacttttttcaaacgtccaggcagggtttgcaaaccgtaaacttaactcaggcttttaaaaatttgcaaggtttgtggggggttcgtgctccagtaggcgatcgttcaactttgtccagtttactaacaccaaactcgcgcctattactgttgctaattgccccctttaccaacaccaacagtttaagtcgagattcatacctgggtcacttagttactttgtaccgcgaagccattggtcaagcgcaggtagacgaacaaacttatcaagaaataaccagtgttagtcgcgcactgggccaggaggacactggcagtttagaggccacacttaactttttactaactaaccgtcgccagcaagtgcctcctcagtacactttaaatgcggaagaagaacgcatattgcgctatgtacagcaatctgtaagtttgtatcttatgcgtgagggtgccacccccagtgccgccttagacatgacagcgcgcaatatggagccgtccttctacgcttccaatcgagctttcattaatcgcttgatggattaccttcaccgcgctgcggccatgaacggggaatactttacaaatgcaattctaaatccgcattggttgccccctcctggattttacactggtgaatttgatttgccggaaggaaatgatggctttttgtgggatgatgttacggacagtctgtttagtcctgcagttattggacaccatggtaaaaaggaagcaggtgatgaaggtcccttgcttgactctcgggcgagttctccattccccagtttaactagtttacccgccagtgttaacagcggtcgtaccaccagaccccgactaacaggtgaaagtgaatacttaaatgaccccatcttgtttccagtgcgcgacaaaaattttcccaacaatggcatagaaagtttggtagataaaatgtctcgctggaaaacatatgcacaagagcggcgagaatgggaggaaagacagccaagaccagttcgccctcctaggcaacgttggcagcgacgcaaaaaaggggcacatgcgggggatgaaggaagcgatgactcagctgacgacagtagtgtattagatttaggagggtcaggaaacccatttgctcatttgcgcccacagggttgcatagggtcattgtattaaattgaataaaagcatacttaccaaagccatggcgaccagtgttcgtcttattttccttcttccgttagctgtgaaatgaggcgcgcggtggaactgcagacagtggcttttcctgagacaccacctccctcttacgaaaccgtgatggcagcggcgccaccctacgtgcctccccgctatttgggtcctacggagggaagaaacagtatccgttactcggaattgtcaccgttgtacgataccactcgagtgtacttggtggacaacaagtcttctgacattgcttcattgaattaccagaatgatcacagcaactttttaaccactgtagtgcaaaataatgactattcccctatagaggctggcacgcaaactattaactttgatgaaaggtctagatggggtggagatttaaaaaccatcttacataccaacatgccaaacgtgaacgattttatgtttaccaccaaatttaaggccagggtaatggtggctaggaaaacaaacaacgaaggccaaaccattttagaatatgagtgggcagaatttgtgctacccgagggtaactattcggaaaccatgactattgacttaatgaacaatgctattattgagcattatttgcgagtaggaagacagcatggagtgctggaaagtgacattggagttaagtttgacaccagaaactttcgtctgggttgggaccccgaaacccaattagtaactccgggagtgtacactaatgaggcttttcatccagatatagtactgcttccaggttgcggggttgattttacagagagcagattaagcaacatactaggtataagaaagaggcagccgtttcaggaaggatttgtgattatgtatgaacacttagagggaggcaatattccagctcttttggatgtaaaaaaatacgaaaacagtctgcaggatcaaaacactgtaagaggagacaactttattgccttaaataaggctgctaggattgaaccggttgaaacagaccccaaaggacgcagttacaacttgcttccagacaaaaaaaatactaaatatcgcagctggtatttggcatacaactacggagacccagaaaaaggagttcggtcatggactctactaacaactccagatgtaacaggcggctccgaacaggtgtactggtccctacccgatatgatgcaagatccggtgacttttcgctcctcgcgtcaagttagcaactatcctgtagttgcagcagaattactgccagttcatgctaaaagcttctacaacgagcaagccgtctactcacagcttattcgccagtcaaccgcgcttacgcgcgtgtttaatcgctttcccgagaaccagatactggtgcgtccaccagccgctaccatcactaccgtcagtgaaaacgttcccgcccttacagatcacgggaccctgccgctgcgtagcagtatcagtggagttcagcgagtcaccatcactgacgcccgccgccggacctgtccctacgtttacaaagcactgggcatagtttctccacgagtgctttctagtcgcactttttaaaaaagtgtggtaacatgtccattttggtttcgccaagtaacaacacgggctggggactgggtgccgcccgcatgtatggaggagctaaaacaaggtctagccaacatccagtgcgcgtacgcggacattaccgagctccatggggcgcgcatacccgaggacgcactggtcgcaccactgtagacgatgttattgactcggtagtggccgatgctcgcaagtaccgcgcgcccgctgaaacagcagggtctactgttgatgcagtaattgatgaggtagtggcaaacgcgcgggcttatgcaaggcgccgcagacggctgcgtcgccggcgtagaccaaccaccgccatgcgcgcggccagagcgttggttcgacgggccaggcgcattgggcggcgagctatgatgcgggcagccaggcgggctgcaacgcctgccggtcgagcgcggagacgggccgcagctgcggccgcaacagctattgcaaacctagctgctccgcgacgaggaaatgtatactgggtgcgcgactcagtgaccgggacgcgtgtgccagttcgtacgcgtccacctcacccttagaagacaaagagtgactcaatgtctgttatgtatgcccagcatgaccaaacgcaagttcaaagaagagctgctgcaggccttagcgcctgaaatatatggcccatcggataaccttaccaagcgcgatatcaagcatgttaaaaaacgggaaaaaaaagaggaagaagtcgccgcggcgtcagcagacggcgtcgagtttgtgcgctcatttgcgcccagacgtagggtacagtggaagggacggcaagtaaaacgcattttgcgaccgggcaccacagtggttttttctcccggagagcgaacgattatgcgtcccctaaagcgcgagtacgacgaagtgtacgcagacgatgacattttggagcaagcggcacaacagactggggaatttgcatatggaaaaaaagggcgttacggagacaaaattgctattcctttggacgagggaaatccaacacccagtttaaaggctgtcactttgcaacaagtgttgcccgtccttgggccttcggaagaaaagcgtggaattaaaagggaagccatggatgaattgcagcctacaatgcaactgatggtgcctaagcggcaaaagttagaggacgtactagagcacatgaaggtggatcctagcgtacagccagatgtaaaagtacgtccgataaaaaaggtagctccaggattgggagttcaaacagtggacattcaaattcctgtgcaaactgcattgggtgaaactatggaaatccaaacttcgccaataaaaacaacggtgaacgcaagcgtgcaaacagacccttggtacccgccagtgctttcaacaaaaaaaaaaaagcgtcactacagacaaacaagttcgcttttgccagactacgttttacatccttccattgtgcccacgcctgggtaccgtgggacaacttttcagcgccgagccacagcccctagccgtagacgaggtccatcacgccgtagacgtcgacgcaaagccactttagccccagcggcagtacgtcgcgttgtacaaagggggcgcacactaatacttccatccgtgcgttaccaccctagcattctctaacaagctgcgctgccgttttttcagatggctcttacttgccgaatgcgcatacccattccaggatacagaggacgaccccgccggaggaaagggctgaccgggaacggtcgatttcggcggcgtagtatgcgcagacgcatgaagggtggggtgctgcccttcctaattccacttattgctgcggccattggagccgttcccggaattgcctcagtagccttgcaggcttctcgaaaaaattaaaataaaataaaacttccaacttattactggtactatgactgttttatgcagactaaatggaagacatcaatttttcgtcgctggccccgcgacacggcacgcggccgtacatgggcacctggaacgagatcggcacgagccagctgaacgggggcgccttcaattggaacagtatctggagcggtcttaaaaattttggttccacgattaagacatatggcaccaaggcgtggaacagccaaaccggccagatgctaagggacaagttaaaagaccaaaattttcaacagaaagttgtagatggtctggcttcgggaattaatggagttgtagacatagccaatcaggctgtacagaaaaaaattgccaaccgtttagagccgcggcccgacgaggtaatggtagaggaaaagctgccacctctagaaactgtgcccggatccgttccaaccaaaggagaaaagcggccacggccggatgcagaggaaaccttagtaacgcacacaacagaaccgccgtcctatgaggaagcaataaaacaaggagccgctctgtcacctaccacctatcccatgaccaagcctattttacccatggctactagagtgtatggaaaaaacgaaaatgtgcctatgacccttgagctgcctcctttgccagaacccactatcgcggatcccgtaggttccgttcctgttgcatctgttccagttgcatcgacagtgagccgtccagcagtgcggcctgttgccgtggctagcttgcgaaacccacgatccagtaattggcaaagtaccctaaacagtattgtgggactgggagtaaagtctctcaaacgccgacgctgctactaacattaaaagacgagtgttaattcccatctgtgtatacgcctcctatgttagcgccagaggaccaacgcgtgaatcgcagtcaccaccagcgctttcaagatgatggccactccctcgatgatgccgcagtggtcttacatgcacatcgccggtcaggatgcctcggagtacctgagtcccggtctggtgcaattcgcccgcgccacggacacctacttcaccctgggaaacaagtttagaaaccccaccgtggctcccacccatgatgttaccaccgatcgctcgcagcgtctgacgctgcgttttgtgcccgtggatcgggaagatactacctactcctacaaggctcgctttacgctggctgtgggtgacaaccgcgtgttagacatggctagttcttactttgacattcgaggggtactggatcgtggtcccagttttaagccctattccggaaccgcctacaattctttggcaccaaaaggcgctcctaatgcttcacaatggtcagataacgctaagcttaatacctttgctcaggcgccgtatcttagcgacactatcaccgccgccgatggtattaaagttggaacagacaccgcccaggcaggcgcggcggtgtatgccaacaaaacttatcagccagagccgcaagtaggaccaagtgaatggaacaccagcattgaaaacgttaaagctggcgggagggcattaaagcaaaccactgcaatgcagccgtgctatggctcctacgctcgtccaaccaacgaacacggaggacaatccaaggatgacaacattgaacttaagttctttgattcagctaacaatgcagcaaacactgctcaagttgtgttctataccgaagacgtaaaccttgaaatgccagacacgcatcttgtgtttaagcctactgttaccaatggaacaattgcttctgagtcgctgttgggacagcaagcagcgccaaatagagcaaactacattgcattcagagataattttattggcctgatgtattacaacagtacaggcaacatgggtgtattggccgggcaagcttcccaacttaacgcagtagtagacctgcaagacagaaatacagagctgtcataccagttaatgctggatgctttgggagacagaacacggtacttttccttgtggaattccgcagtggacagttacgaccctgacgttcgcgttattgagaatcacggggtagaggatgaactaccaaattattgctttcctcttagcgcagtaggtgaaataaaaaattacaaaggcattaagccagataacggaggaggaggtggctggactgccgacaacactgtcagtgaagcaaaccacataggcattgggaatatagccgccatggaaattaatttgcaggctaatttgtggagaagcttcttgtactcaaatgtgggcttatacctaccagacgacttaaaatacactccaggaaacataaaactacctgataacaagaacacctacgagtacatgaacgggcgtgtgactgccccggggttggtggatacctatgtcaatatcggcgctcgctggtccccagatgtgatggataatgtaaacccttttaaccaccaccgaaacgcagggttgcgctacagatccatgttgctaggcaatgggagatttgttccttttcacattcaggtgccgcaaaaattttttgccatcagaaatttgttgctgttgcccggttcctacacttacgaatggaactttagaaaggatgtaaacatgattcttcagagcacactgggaaatgatcttcgggtggacggagccagcgttcgctttgacaacattgccctgtatgctaacttttttcccatggcacataacacagcttctactttagaagccatgttaagaaatgacaccaacgaccagtcttttaacgattatttgtgtgctgcaaacatgctgtatcccatcccagctaacgccaccagcgtgcccatttcaataccttcgcgaaattgggcggcatttagaggctggagctttactcgcctaaaaactaaagaaactccttccctgggttcagggtttgacccctactttgtatactctggaaccattccctatttagacggcaccttttacctaaaccacacttttaagaaggtgtcaatcatgtttgactcctccgtgagttggcctggaaatgaccgtttgctaaccccaaatgaatttgaaataaagcgttctgtggatggggagggatacaatgtggcccaatgcaatatgactaaggattggttcctaatacaaatgcttagtcattacaacattggataccaaggtttttacattccagagagctacaaggaccgcatgtattctttctttagaaactttcagcccatgagtaggcaagttgtggataccacagaatataagaactacaaaaaagtaaccgtagagtttcaacataacaactcaggattcgtgggatacctgggccccactatgcgggagggacaagcttaccccgccaactatccctaccctcttataggcaaaacagctgtggaaagcatcacacagaaaaagtttctatgcgatcgtgttatgtggcgcatcccattttctagtaacttcatgtctatgggggcgctaacggatcttgggcaaaatatgctgtacgcaaactcagcccatgctctagacatgacatttgaggtggatccaatggatgagcctacccttctttatgttttatttgaagttttcgacgtggtacgcattcaccagccacaccgcggcgtcattgaagcggtctacctgcgcacgcccttctcggcgggtaacgctaccacctaagaaggcaccctcccagactgctgtaatgggttcaagcgaacaggagctgacggccattgttcgagatctaggctgtggaccctattttttgggaacctttgacaaacgttttccgggttttgtgtctcgcgaccgcttatcatgtgctattgttaacactgccggtcgcgaaactgggggcgtacactggctggcttttggatggaaccccaaatcgcacacttgctatttattcgatccatttggattttctgatcaacgactaaaacaaatctatcagtttgagtacgaaagtctgttgcgccgtagtgcgctagcggccactaaagaccgatgcgttaccctagaaaagtcaacccaaactgtacaaggaccgttttctgcagcgtgcggcctgttttgttgtatgttcttacacgcttttactcactggcctgaccatccaatggataaaaatcccactatggacctacttactggggtgcctaattgtatgctacaaagtcctcaggtagtgggcacattgcaacgcaatcagaatgaattgtataaattcttaaacaatctgtccccttactttcgtcacaaccgcgagcgcatagaaaaagctacatcttttactaaaatgcaaaatggactcaaataaacgtgtacacaatgcattaataataaaaccattttattagctcattggagtacaagcttgactgttttattaaaaatcaaatggctcttcgcgacagtcgccgtggttggtgggcagggatatgtttctgtactgcaaacgctgatgccacttgaattctggaataacaagcctaggggggggagccgtcaaaattttctccccacagctggcgcacaagttgcagggcgcccataacatcaggagcagaaatcttgaagtcgcaattagggccagcattgccgcgcgcattgcgataaactggatttgcgcactgaaaaaccaacaaacacggatacttaatactggctaacgctccagggtcggttacttcgttgatatcaatgttatccacattgctgaggttaaaaggagtgattttacacagttgacgccccatccgtggcaggccatcttgcttgtttaaacattcgcagcgcactggcataaggagacgtttttgcccatgtcgcatgtgagggtagtcggccagcataaaagcttcaatttgcctaaaagctatttgagccttcattccttcagaataaaacaagccgcaggactttccggagaaagaattattcccgcagccaacatcatgaaaacagcagcgggcatcgtcgtttttaatttgaactacattacgcccccagcggttttgcgccaccttggctttcgaggggttctctttcaacgctcgttgcccactttcgctggttacatccatttccaccaaatgctctttgcgcaccatctccattccatgcaggcatctaagctccccttcgcgctcggtacacttatgctcccacacgcagcaaccggtgggttcccaggaattctgttggacaccggcataagcttgcatatatccttgcaaaaagcgtcccatgagctcctgaaaggttttttgggatgaaaaagtcagctgcaaaccgcgcttttcttcgttgagccatgttgtgcatattttcttgtacacgctgccctgatccggcaaaaaacgaaaggtggcgcgctcgtcgtgatccacatggtacttttccattagcatagccatggcttccatgcctttttcccaagctgaaactaggggctggcttgccggattgcgaacaacaacaacaacattcttttcattttcgtcgctgttttgagcggaagccttcaaaacgtgtacctgcctggtttccattttttgaaaagactgagaaccgtctgcatgatgcataatgcggacgggcggcatgctgaaacccattactcctaaaactgctcttggtggttctgcctcttcttcttctgcactctctggggaaagaggtatcgcagccatagatttcttgacttttttctttggaggtaaaggcacagcttccagttcttcttcgctttcggaatccagaaagtatctgcccatttttggcggcggcggctgagcgctgcggtctggggtgcgctccctctgtgagtgctgattgctggccattatttaatcctaggcaaagaaacacatgatggatctggagccacaggaaagcttaaccgcccccaccgctcccgccattggcgctacggctgtcatggagaaggacaaaagtctactcataccccaagacgcaccggttgagcagaacttgggctacgagactccccccgaggaatttgaaggctttcttcaaatccaaaagcaaccaaatgagcaaaacgctgggctcgaggaccatgactacctaaacgagggagatgtcctgtttaaacatctacagcgacaaagcactatcgttcgcgacgccatatctgatcgctcttcaataccagtttcaattgcagaactatcttgcatctacgaacgcaacctgttctccccacgtgtgccccctaaacggcaagccaacggcacatgcgagccaaatcctcgccttaacttctacccagtttttgcagtgccagaagcactggcaacataccatattttctttaaaaatcacaaaatacccctatcctgtcgagctaaccgcagccgcgcagatgagcttcttgctttaagggctggcgcttccatacctgggattgtgtccttggaagaggtgcctaaaatttttgaaggtttaggtcgggatgaaaaacgagcagcaaatgccctgcaaaaagaaaatgaacaaaatcaccatgggaatagtgctctaatagaactggaaggtgacaatgcccgcctggcagttttaaagcgcaatattgaggttactcactttgcctacccggcagtaaatcttccgccaaaggtaatgagcgcagtgatgaatcagctactaattaagcgagcccaacccattgacaaagatgcaaacttgcaagacccggaggcaacagatgatggaaagccggttgtaagcgacgagcaattaactaagtggttgggaacagacaattccaacgaactacaacagcggcgtaaactcatgatggccgccgtacttgtaactgtggaactcgagtgcatgcatcgttttttctccgacatcaccacattgcgcaaaattgaggaatgtcttcactacactttccgccatggctacgtgcgccaagcctgtaaaatttctaatgtggagctgagcaatctagtttcttacatgggcatcttgcatgaaaaccgattgggacagaacgtgctacactcaacactacgcgatgaagcacgcagagattacgtgcgagactgcatttaccttttcctgttacatacctggcaaactgggatgggtgtttggcagcaatgcttggaagaaaaaaaccttcgagaactaaacaaactgttagacagagcactaaaatccctatggaccggttttgacgaacggacagtagctgcagagctagctgacataattttcccagaaaggttaatgataaccttgcaaaacggcttgcctgactttatgagtcaaagtatgctgcacaattatcgctcttttatattagagcgttctgggatgcttcctagcatgtgttgtgcacttccttcagattttgtgcctatatattttagagagtgcccccctcccctgtggagccactgctacttactacgacttgctaactacctagcttaccactcagaccttatgacagattcaagcggcgaaggcctaatggagtgtcactgccgctgcaatctttgcaccccccaccgttctttggtttgcaatactgaactattaagtgaaagtcaagtcattggtaccttcgaaatgcagggaccgcagtctgacagcaatttcacgacgaacctaagacttacccctgggctttggacttctgcctacctgcgcaaatttgaaccccaagattaccacgcccacagtatcaatttttacgaagaccaatccaaacccccaaaagcgccactaacggcttgcgtcattacgcagggaaaaattctagcccaattgcatgctattaagcaagcgcgcgaagagtttttacttaaaaaaggacacggagtgtaccttgatccccaaaccggcgaggaactaaaccttccatcacctttgtgtgctactgcgtctccccattcgcagcatgtccccgaaagccgcaaaacaggctattgcgcagcaacgctcaaagaaacagcagcaacggcaggaaatctgggaggaagaatcttgggagagtcaggcagaggacgaggtcgaggacttggaagaatgggaggaggaggaggcggacagcctagacgaggatccagaggaggaggaggaaggttccaaggacggagcgaccgccgcaaaaccgtcgctttcaaccaagccctctccaatgaaacccgctgtgagcaaatctcagaaagccagccgtagatgggacaccattgaaaccagcgccgcaaacttgggtaagaatcgcaagcaggcgcgtcggggctactgctcatggcgggctcacaaaagtaatattgtagcctgcttgcagcactgcggggggaatatctcatttgcaaggcggtatttgctataccatgatggagtggcgattccaaggaatgtcctccattactaccgtcatctctacagcccctttgaagagctcgacaaggaaccgacctgcaacagccaagcggcccactagaatcggcaacagcagcaacaaggaaagtcctgaggcgcgcgagttaagaaaacgcatttttcccactttatatgctatttttcagcagagtcgaggtcaagaacacgaactgaaaataaaaaaccgttccctgcgttcacttacccgcagctgtctctacctcaaaagcgaagatcagttgcaacgcaccttgcaggacgcagaagctctgttcaataaatactgctccctctcgcttaaagagtaaaaaaagcccgcgcgcggactttcaacaggcgggaaaagtgacgtcacaacaagatgagtaaagatattcccacgccttacatgtggagctttcaaccgcaaatgggactggcggccggcgcggctcaagactattctagcaaaatgaattggttaagcgccggaccccacatgatttccagggtgaatggggtacgagcccggcgtaaccaaatactgctagaacaagccgctctcaccgctacaccacgtaatcaacttaaccctccctcttggccagctgccctgatatatcaggaaaatccccctcctaccactgtacttttgcctcgcgacgcccaggccgaagtccatatgactaacgctggggcacagcttgcgggcggtgcacgtcacagtttcaggtataaaggtcgcactgagccctatccgtctccagctataaaaagagtactcatcagagggaaaggtattcagctgaacgacgaagtcacatcgccattgggagtcagacccgacggagtgtttcagctcggagggtccggacgttcctcctttaccgctcgtcaagcctacctgacactacagagctcatcctcagctccgagatctggtggtattggaactctccaatttgtggaggaatttactccatctgtttacttcaatcctttttcgggctcgcctggacactatcctgacgccttcatacccaactttgacgcagtgagtgaatctgtggatggctatgattaatgtctaatggagcggctgacagagcgcggctgcgacatttagaccactgtcgccaacctcactgctttgctcgagacatctgtgtctttacctactttgagcttccagaggagcacccccaggggccagctcacggtgtcagaataacagttgaaaaaggaattgatacacacctcattaaatttttcaccaaacgcccgctattggtggaaaaagatcaaggaaatactatattaactttatattgcatttgtcctgttcccggattacatgaagatttctgctgtcatttgtgtgctgaatttaatcatctgtagtggcgctgtaccgcctgaagaagaacctaactgtcatccgcatttaagcaacattaaaatcaacctttcgatccctcatatcactcttcgctgcagttttttttccacacatctcacctggacctttaacggaaaacacgttaccaatacagatataaagtttaaactacacaaagaaaacatcactctatttcaacctattaacctgggatactaccgctgctcagctccaccctgtacgcaagcattttttgttgctccagttattgacaaacgccctgctccgacaacagctgctgtcactgagcacatcaccgaggcagtttctccttctaaaggtacagaggaaattgtgtacttttcaaactttacaaaccacttagttttaaattgttcctgttctaactccttaatttcatggtttgctaacagctctctgtgcaaaactttctaccaaggaaaacttttgtattctgctaaactcacattgtgtaaccagagcaccccttcccaccttactctattgccaccttttgttgccggtcgttacttttgcataggagctgcacgtactagcccctgtcaacagcattggaatttaacttactgtcccccaccagtgtcgccctttgtgatcaatactgaatatttagactataatcccttgcttgcttacggcggtctcgcagctcttattttattcctgatttctaacttgtttctagtgcaacatttgtattcatactaacaatgctttccatttttcttttatttctcttttctttaccttctggcttgtatgctcaaacagccgaaagaccactaaaagtcgtggtggaagctggccataatgtaacccttccccacctttctggttcacaccaaactggccatgttacttggctagtagagacatcagattatggttcagcttctccagacaacttcattttcagtggacaaaaactatgccagtttactgacagaaccatggtgtggccttattacaatttacattttaactgtgaaaattatgaccttaatctgttttggcttaaggtggaaaattcggctatttacaacgttaaaaatacagtcaatgcttctgaaacaaatatttactatgatttaagagtagtacaaatttttccacctaaatgcatcattacttcaaagtaccttacaaacgattattgtcacattacaattaactgcactaactctgattaccccaataaggttgtgtttaataatgtcagtcgatggtactacggatacggtaagggcagcccaacccttcccaactactttataactaactttaatgtttcaggtattactaaaagctttaatcacacttacccttttaatgagctctgtgattatcccacatcccaatctcaacacagtttaacacatacagtaagcacagtaatctttttaggaataattggcttcagcattttgattattatagcagcctttatttatctgtgctggcatagaaaatctttgtgtgtttctaaaacagaacctcttatgccgattccttactagttttcttttttcttacagtatggtgacggttcttctcatctttttatgcctgccagtcattttttcttcttcgacttttgccgcagtcagtgaccttgatcccgagtgtttagccccctttgcggtgtacctgattttcacatttgtgactgctacctgcgtctgcagtattattactctgctaatcacctcgctccaattttttgattactactacgtgagaattgtttaccgcagacaccacccccgttaccaaaaccctcaaattgcggctcttttgcagctccaaccatgaaaacagcattagttcttttctttatgttaatcccagtttgggctagttcttgtcaactacataaaccatggaattttttagattgttatactaaagaaacaaactacataggctgggtttatggaattatgtctggcttagtatttgtctcctctgtagtttctttacaactgtatgcgcgccttaattttagttggaataagtatactgatgatcttcccgaatatccaaacccccaggatgatttacccctaaatattgtatttccagagcccccgcgtcctccttctgttgttagctattttaagttcaccggtgaagatgattgaacctgatctagaaattgatggaagaatcaccgaacagaggctcctcactgatcgcgctaggcgacgccaacaggatcaaaaaaataaagagttaattgatttacaaaccgtgcatcagtgtaaaaaaggacttttttgcctggtaaaacaagctacccttcgctatgaatctttaccaggcaaagaacatcaactgtgctacacgctgcccactcagcgacaaacctttactgcaatggtgggctcggtacctattaaagtgtcccaacaagcaggagaacaagaaggctctattcggcgcctatgtgataaccctgaatgtttgtacactttaataaaaacactgtgcggtttaagaaatcttttaccaatgaattaaataaattacttaccggaaatctgaaaatacatcatggtctccgtgtactcttataaaatttccctcttcccaactgtcaaacctgacagacttgcaaacagcaaactttctccaaatcttaaatggaaggtcagattcttcttcccaatccctacccaccatcttcatcttttctagatgaagcgcagcagaacccagtatgctgaagaaacagaagaaaatgatgacttcaaccccgtttacccttttgacccatttgacacatcagacgtaccctttgttacacccccttttacttcttccaatggtcttcaagaaaaaccaccaggtgtattagcacttaattacaaagaccccattgtaactgaaaatggaacccttacactcaagctaggggacggaataaaacttaatgcccaaggtcaacttacagctagtaataatatcaatgttttggagccccttaccaacacctcacaaggtcttaaactttcttggagcgcccccctagcagtaaaggctagtgccctcacacttaacacaagagcgcccttaaccacaacggatgaaagcttagccttaataaccgcccctcccattacagtagagtcttcgcgtttgggcttggccaccatagcccctctaagcttagatggaggtggaaacctaggtttaaatctttctgctcccctggacgttagtaacaacaatttgcatctcaccactgaaactcccttagttgtaaattctagcggtgccctatctgttgctactgcagaccccataagtgttcgcaacaacgctcttaccctacctacggcagatccgttaatggtgagctccgatgggttgggaataagtgtcactagtcccattacagtaataaacggttccttagccttgtctacaactgctcccctcaacagcacaggatccactttaagtctgtctgttgccaatcctctgactatttcacaagacacattgactgtttccactggtaacggtcttcaagtgtcggggtctcaattagtaacaagaataggggatggtttaacattcgataatggggtcatgaaagtaaacgttgccgggggaatgagaacttctggcggtagaataattttagatgttaattatccctttgatgcgagcaataacctgtccttaagacggggattgggactaatttataaccaatctacaaactggaacttaacaactgatattagtaccgaaaaaggtttaatgtttagtggcaatcaaatagctcttaatgcaggtcaggggcttacatttaataatggccaacttagggttaagttgggagctggacttatttttgattcaaacaataacattgccttaggcagcagcagcaacactccatacgaccctctgacactgtggacaactcctgacccaccaccaaactgcagcctcatacaagagctagatgcaaaactcaccctgtgcttaacaaaaaacggatctattgttaatggcattgtaagtttagtgggtgttaagggtaatctcctaaatatccaaagtactactaccactgtaggagtgcatttagtgtttgatgaacagggaagattaatcacatcaacccctactgccctggttccccaagcttcgtggggatatagacaaggccaatcagtgtctaccaatactgttaccaatggtctaggttttatgcctaatgtgagtgcttaccctagaccaaatgccagtgaggctaaaagccaaatggtaagtctcacgtacttacagggagatacatctaaacctataacaatgaaagttgcatttaatggcattacgtcgctaaatggatactctttaacattcatgtggtcaggtctatcaaactatataaatcagcctttctctacaccatcctgctccttttcttacattacccaagaataaaaacacacacaaaacacaaattgcgtacttattgtttattttttttttttttttacactatacgcgtggttaaactgcctccttcccattttaccttgtatacctccctttccccctttgtagctgaaaacaactgcacttgaatatttcgacttaggttttttggcgttagcgtccacacagtttctttacgggcaaagcgagggtcggtgatggaaacgaatccctcgcccgcacagtcactcaagcggcattccccatccaaaaccaggtccatgattttatcctacaaaaagtaacaacagtcagtgtccatcagccgcccaaggattctctcgttgattataatctccaaataaaattgctcgatgatgcataattaaaccctttagcagttgctgacgataacgttcatgccgactatgttttagagggcgaacagtgttttcagcaattacttgaacaacttttaacattagcagtctggtacgacgagcgcaacagcgcatgcgtatctcacttaagtctttacaataatcacaacacagcactaacatgttatttaaaattccataattaaaggcgctccatccaaaactaactttttctaacgctaaccaggcatggccatcatacataattttaaagtaaattaaatggcgacctctaacaaaggtgcttcccacatacatcacctctttaggcattaaatggttaacaacctcccgataccaaaaacaccttttgttaattaaggcgccatatacggccattttgaaccagcgtcccaaaagcatcccagctgacatacactgtagtgaacccggacgctggcaatgacaatgaataagccaccgctcatgaccatgtaataattgagtaacttcaacatttatagtggcacaacacatacatacactcatgtattttttcaaaataaacatctcataatcagttagaatcatatcccacggtattggccattcctgcagcactgtaaaacctacacatgaaggaatgcctcttacctcacttacattatgtaaagtcagactattacactcaggccataaagaattttccgaagtactcaacgtagcttttgactgttcctcacagggcggtagttggtacttgttgtatggtgccaatctgtagcgataccgtctgtcgcgctgcatcgtaaacaacagacttgcgagcgtcttcgtacttaaaaaaacaaaaccacgtacgaccactggttatcgcacctcgtcctttttgtttgcagcgttggcgttccgtcaaaaaagcaaagtacaaccactctcgcaggcttgctaaaatgtattcagcttcaggtgttatcttcaaatcatgatgtttaataaagcgcagagtatccacacaggatgcatgggctaaaccaagccatgctatgcaggcagccgtgtcccgacttacaggaggaggaggaatacaaggtagaggcataaaaacttaatcaagacggtcagcaaggatttgaatgcgtaaatctcgcaggtggcagcgatcgcctccgctgtgctggtgaaagatcacagccagatcaaattgtaagcgattttccaaatgttcaacaacagcttctaaaagagccacagctctgatttcgataaacaaaagcaaagcaaatgcattatcatgaaactcttctatcatcaaactgcctgactgaaccattcccaggtaattttcattcttccactgttgtattatttgaacacactgattttgcaggtttaaaccgtgaatattaaaaagctctgtaagggcgccctccaccgccatccgcaggcagtacttcatatttgctgaaaaaagtctggatcttcaaacacctgcagtaaattcagtagatttacattaggctccacaccttggtctcgcagctgacatcttaatgccagttgtataaaatcatacaaatcagaagccagcagcaaagaaagttcacctccaggtacaagttccggagttcccacagaacatacaacttgcacaaatggacccatattagtaagcgtggcgccaacgtagacatcgcgcataggaggagttaaataatgcattaccagcagccaaaactcaggtagcacgtctttaagaaacgtcaccacctcaaaatctaagccatgcaaatagttccgtaaagactccggaaacaacacggagtaatgaacaagcgacctctgaaacatgctttaggttagcctgaaaaataaaaatatgttaaattaaagatgcctggcaaacgggtggaaaaacaactctacttaaaagcaagcgcgcgactggctgctttgcgcgaacatcgcaaaacacgtcggaatgattaaacaacaaaacactgagctccattcttgagcctggataaagcgtttcagcgccaacaaaaacccctctggcgttcatgtcgcataatgaaaacaatgttcccaaatatccaggaggaatatcaactgctatgtgcaaatataaaagcacaactccatgtggaggtataacaaaattcgcaggagaaaataacacataagcattagagtcgccctcttgtttaggcaacatagccccaggtcccgtaaaatacacataaagagtctcaaaagcagccataatgccttaccagaaaaacagtacaaagccaggcacagcagacacaatctgccgcaagtgcgcacctttaatactgaaaaatagtgacgtaaatggccaaagttcgcctacacaacacaaaaaaaaccccaaaagcccgcgaaaaaaatcacttccgcatatgactcggcataatacggtgttctcacgacacgtcacatccggcgcgcccggctcccacgccgcgccccacttcctcatccgcccaaacttacaagcacgccaaagccacacctccacccaatcaaattacacactacgcccacttcattttaatattggcactagtccagtataaggtatattattagatagggccaagctatttaggtgacactatagaatactcaagctatgcatcaagcttggtaccgagctcggatccactagtaacggccgccagtgtgctggaattcgcccttgtttaaacgcgatcg

SEQ ID NO: 2 - DNA, 34373 bp, Adenovirus A18
  MISC_FEATURE (1)..(34373): Complete Genome
cgatcgcgtttaaacaagggcgaattccagcacactggcggccgttactagtggatccgagctcggtaccaagcttgatgcatagcttgagtattctatagtgtcacctaaatagcttggccctatctaaatatataccttatactggactagagccaatattaaaatgaagtgggtgtggcgatgtactttgattgggtggaggtgtggcctgggcgtgtttgtaagtttgggcggatgaggaagttgggcgcggcgtgggagccgggcgcgccggatgtgacgtgtttaacgccattttaatgcggaaatgatgtgttttgggcgttggttgtgaaaattctgtatttttggcgcgaaaacctgaaatacggaagtgaaaactgatgacgacagtttattataggcgcgtaatatttaccgagggcagagtgaactttgagcctctacgtgtgggtttcggtacgtgagtgttagggaatgtccacgttggcgttcaaagggcgcgtttattgtgtttcgctgggtatttaattccgctgggattgtcaagaggccactcttgagtgccagcgagaagagatttctctgccagctccactcggcgccattatgaggacagaaattactcctttggttctgtcgtgtgaagaggctgatgacatattggaggacttggtgaacaatttttttaccgaggtacccgatgatggggatgatttttatactccttctctttatgaactgtatgatattgatgtggacgttactgacaacgattgtgatgagcaggctgtaagtgcattttttcctgagtcgctacttttagccaccagtgaggggctgttgttgacagaacctccagttatttctccagtagccgctagtgatgggctgttgttgacagaccctccgattctttctccggtatgtgaacccgttgggggtgaatatatgccccgactgcagcctgaagatgagcaggatgtacgcggaatggcattggtgtccgcatctgctatggctgctgttacgcatcatgagaagtttgagttagataatccagaactgcctgggcatgattgtaagtcctgtgaatatcatcggaatagtactggaaataatgacttaatgtgttctctgtgttatctgcgagcatacggcatgtttatttacagtaagtgcattttaaaacggggggtgggttagtttaaaagtacactcaaagtaattttttttttttttactgttttaggtcctgtttcagacaatgaggtagatgactctaatagggacaaacgaccgtcgcctccaacactaggaaacgcagttcctgaaggagtgttaaaacctgttccgcaacggattactggcaggcgtacccatgttgaaagcattttggatttgattcaagaggaagaaagtgaacaaacagagcctgttgatttgtcagtgaaacgccctagatatgattagtggactttgcacacctgtgcaataaaggaagggtggttttggccctttagtgacgtacaataaaattgtttttctgttaagtgttttattggtttcattgggcgtggttaacatggatataaaggtggggtggtagtgctgaggctgatttactttagtatggagttggaagctgtgctgcaaagttatcagggcgttcgtcagctcttacagtatacctctaaaaacacttcaggtttttggagatatctgtttgggtctactttatgcaaagtggtacatagggtaaaagaagactacaggaaggaatttgaaaacatactggccggctgtccagggcttttggcatctttagatctttgccaccactcgatttttcaagagaaagtggtcaaatctttggatttttcatctgcagggcgaacggttgcttctattgcttttttggtaaccgttttagataaatggagccagacgtcccagctgagttgggattacatgctggattacatggcaatgcagctgtggagggcatggctcacgaggagggtttgcatttactcgctggcgcggcctttgaccatgccgcgactgccaacgttgcaggaggaggagctggagcagcgggaccctgcggcggagaagtgaacatggaacaacaggtgcaagaaggccatgcacttgaccctgaggaagggcccagctgtgcagctgttaacattaagcgggaacgggaaacggttcttagtaggctagctgttaatataatgtctcgcccgcgcttagaaactgtgtattggcaggaactgcaaaatgagtttcagcaaggagatatgcatttacagtacaagtatggttttgagcaattaaaaactcactggttagagccttgggaagatattgagagtgctattaaaacttttgcaaagttagctttacgccctgatcgcagctataaaattagtaaaacaataactattgcttcatatgcttacattattggtaatggtgcaataattgaggtggatacaagtgacagggttgctttcagatgtcgcatgcagggcatgggtcctggggtggtggggttgggcggtattacctttattaatgttagatttgctggagacaaatttaaaggtactttgtttgaagccaacaccagccttgttttgcatggtgtttattttcttaattttagtaatacttgtgtggagtcttggattaaggtttccgcaaggggctgtacgttttatggttgtaggaggggtttagtaggcagaccaaaaagtaaaatgtctgtaaaaaaatgcttgtttgagaaatgcgtgctagccttaattgtggagggggatgcgcatattagacataatgcagcttcagaaaatacatgttttgttctagtgaagggaatggctgttttaaggcacaatatggtttgtggagtgtccgatcaatctgcgcgccgttatgttacttgcgctgatggaaattgtcatgccttaaaaactattcatgttgtgagccatgttaaacatcgctggcctgtgtgtgatcataatatgtttatgcgttgttccatgcatttaggcttaaggcgtggcatgtttgtgccttttcaatgtaaccttagtcatacaaatgtattgcttgaacctgaggtgttttctagaataagtttaaatggggtgtttgacctgtctgtggaattgtataaggttataagatatgatgatactcgtcaccgttgtcgacagtgtgagtgtggcagcagtcatctggaactccgccctgttttattgaatgtgacggaggagctgaggagtgaccaccttaccttatcttgcctgcgaactgactacgaatccagtgatgaagacggcaactaagggtaagtgggcggagctaagggcttataaagacaccataaggaaaacttaagctattttgttattttacagcaacatgaatggaactacgcaagacaacgctgcgctttttgatggaggggttttcagtccttatttgacttccaggttgccgtactgggccggagtgcgtcagaatgtgatgggatctaccttggacggccgacctgtggcacctgctaattcgtcaaccttaacatatgcaactgtgggaccttcgcctttggacactgctaccgccgctgcggcctctgcagccgcttccaccgctcgcagtatggcagccgatttcaacttctacagtcacttagcttcaaacgctgtgacgcgcactgcggttcgggaagacattctaactatgatgctggctaagcttgagactctaaccgctcagttagaagatctatcgcagaaggttgaagagcttgctgttgcctctacccgtacccccccagcccaacctgtagcccaataaaaactaaaaaaatcagaaaactgtgttagaatctttattagtgtttgttttttcttacatgataggctctggtccatctttccctgtcactaataacacgatgaatgtgttctagtatgctatagagatgcgattgtatattaagatacattggcataagaccgtctttagggtgaaggtagcaccactgtagggcttcatgttctggggtggtgttataaataatccaatcatagcaagaacgctgggcatggtggtgaaatatgtccttaagtaataagctaattgctagcggaagccctttagtgtaggtatttataaagcgattaagctgggtggggtgcatacgtggagacatgatgtgcatttttgattgtattttaagattagcaatgttaccggccaaatctcttctgggattcatgttatgtaaaaccactaaaactgtgtatccggtacatttaggaaatttatcatgtagtttggaagggaaggcatggaagaacttagaaacggctttgtggctgcccaaattttccatgcactcgtccattattatggcaattggccctacagcggccgcctgagcaaaaatgttttttggatcagaaacatcatagttgtggtccagagttaagtcatcgtaggacagcttaacaaatttagggcgcaatgttccagattggggtattaaagttccttggggtcctggggcataattcccttcacaaatttgcatttcccaagctttaatttcagacgggggaatcatatcaacctggggagcaataaaaaaaacagtttctggagcaggtgtaaccagctgggccgaaagcaagttacgcaatagctgcgatttaccgcaaccagtaggtccgtaaataaccccaataactggttgtaaatgatagtttaacgaggtgcagctgccgtcttctcggaggagtggggccacctcattcatcatttgtctgacgcatgtgttttgcttagctagttcccccaaaagacgctctccgcccagcgatagcaactcctgtaaagatttaaaatttttaagaggttttaaaccatcagccataggcatgtgatctagggtttgcttcagcagctgcagccggtcccacagttctgtaatattttctatggcatctcgatccagcaaatttcctcgttgcgggggttgggttggctgttgctgtaagggatgagacgatgagcgtctaggtgggcgagagttttgtctttccagggtcgcaaggtgcgcttgagagttgtttccgtcactgtaaatggatgcgctcctggttgtgcgctggccaatgtgcgcttcaaactcagacggctggtactgaactgggcgtcttctccctgtgcttcggcaaggtagcattttaacatgagatcataagacagagcatctgcggcatgtcctttagctcgtatttttccttttgagatgcgtttgcagctgggacactgaaggcatttaagggcgtatagttttggagccaaaaacacagattctggagagtatgcatcagagccgcagaagttacaaacagtttcacattcaactgaccaggtcagctcaggacaagatggatcaaaaacaagttttccaccgtgctttttgatgcgtttcctaccttgtgactccataaggcggcgtccttcctctgtcacaaaaaggctgtctgtgtctccgtacacggatttaagaggtctgtccttcaggggtattccgcggtcttcttcgtacaggaattctgaccactctgacacaaaagccctagtccaagcgagtacaaaggaagcaacatgggaaggataccggtcgttacttattaagggattagagctttctagggtgtgtaagcacatatccccttcttcagcatccagaaatgtgattggcttgtaggtgtaagtcacatgacctgaggtttctggtggggggctataaaagggggcgggtccttgatcttcatcgctttcttctgcatcgctgtttacgagcgccagctgttggggtaagtacacgcgctcaaaagcaggcattacatctgtactcaaggtgtcagtttctataaatgatgaggatttgatgtttaagcgacctgctgtaatttccttcataagtccttcttccatttgatcagaaaaaacaatttttttattgtcaagtttggtggcaaaagatccatacagggcatttgaaagcagtttggctatggagcgtagggtttgattcttgtccttatctgcgcgttcctttgcagcgatattaagttgcacatattcacgtgccaggcacttccaggtaggaaagatggtggtgcgttcgtcaggaaggaggcgcactcgccatccacggttgtgcagtgtgattatgtctacactagtaactacttccccccgcaagcgctcattggtccacactaggcgaccgccttttcgtgaacaatatggagggagaatatctagttgattttcatctggaggatcagcatctacagtaaaaatacctggacaaagatttttatcaaaatagtcaatcttacaagtatagttttccagcgccatgtgccattgccgcgcggccaatgcgcgttcataggggttaaggggtggaccccaaggcatagggtgtgttagtgctgatgcatacatgccacaaatatcatatacatatatgggttgttttaatactcctatgtaggtaggataacacctaccgccgcggatgctggcgcgaacatagtcatataattcatgtgacggcgccaggatgttgggtccaaggtttgtccgctgtggtttttcggagcgatatagaatttgcctaaaaattgcatgagagttagaggaaatggtaggtcgctgaaatacattaaagtgtgccgcatgaaggcccacagagttagtaataaagtgggcataggagttgtacagtttttctaccagtgcggctgtaacaagtacatccagggcacaatagtttaatgtttccttaataaggttgtaatttttttctttctttgttttccatagttgttggtttaggaggtattcttccttgtccttccaatactcttccacgggaaaaccgtctgcatttgcacggtaagaaccaagcatataaaattcatttatagctttgtagggacaacatcctttttctacagaaagggcatatgcttgcgcagcttttcttaatgatgtatgagtaagagcaaatgtgtctctaaccattactttcaaatactgatatttaaagtcttggtcattacaacctccttgttcccacagtgaaaagtctattcgttttttatagtgtggattaggaagagcgaaggtgatatcattaaataagattttgccagctcttggcatgaaatttctagaaattttaaagggtccaggaacgtctgagcggctgttaatgacctgtgcggccagaacaatttcatcaaatccattaatgttgtgtcctacaatgtataattctacgaaccttggctgacccttaattgctggagcttttttaaggtcttcgtaggcaaggtcctcaagagcggttagtccgtgttcctgttgagcccaatgaggcaagtggggatttttttgtaaaaaatgtgaccaaatatcattggctaaggatgtttgcaagcggtttctgtaggttcgaaactgttgtcccactttagttttttcggggtttatgcaataaaaagtagtggggtctttttcccactggtcccatccaagttccaaagcaagttgtaacccctggtttacaagacactcatccccagttaatttcatgacaagcataaatgggacaagctgctttccaaatgcccccatccaggtataggtttctacatcataggtaataaaaagacgctcagtgcgaggatgcgagccgatcgggaaaaattggatctcctgccaccaattggaagaatggctgttgatgtggtgaaagtagaaatctcggcggcggacagagcattcatgctgatgtttataaaagcgaccgcagtgttcgcatcgttgcacgggttgtatctgctgaatgaggtgtactcggcgacctcgcgccaaaaagcagaggggaaaatcgaccccttgttttggcgggtgccgttcgtcctctttctcttcttgtgcattgtcactaccgcctggattctggaaagcgaggacggaaagggtgacggtgccccgagagccgcacgtccagatctcagcacgagtggggcggagatgagaaaccagggcgtgcagcttggcgctgtccatggtatcgccaagagagaaaagcaagtctgcggggacagctttcaagttaactgcacacaggcgggtaagagcaggttgaaggtgcaggtgatacttgatttcaaggggagtgccggtggcagaattgattgcatgtagtattccatgggcccggggactaagcaccgttccacgatgaactttttctatgcctttgtttaaaatcggcggcgtggtcgggctcccggaggaagaggtggttcgggtcctgcgtaaagctgaggaaggggtatgtcggcttgtcgctctggcaggggaagatgttgagcacgaagttgactggcccgggcaactacccggcgattgatgtcttgaatttggcggcgttgtgtaaacactactggccctgttgtcttgaacctgaaagaaagttcaacagaatcaatttcggtatcatttactgcagcctgtctaagaatttcctgaacgtcgcctgagttatcttggtaggcaatttctgccattaattgatcaatttcttcgtcctggaggtcgccatgtcccgcccgttcaatggtggcggcaagatcgttagatatgcgactcataagctgtgagaatgcgtttagtccaatttcgttccagacgcggctgtataccactcctccatcgctatctcgggcgcgcatcaccacctgtgccaggtttaattctactagtcgtgcaaacacgccgtagttgcgcaagcgttgaaacaggtagttcaaggtggtggcaatatgttccgagacaaagaaataaagaatccagcggcgcagcgttagctcgttgatgtctcctagggcctcaagacggtccatggcctcgtagaagtccaccgcaaagctgaaaaactgggagttgcgagccgccaccgttaactcctgttctagaagacgaatgagctcggctactgtttcgcgaacttcccgttcaaatgcccatggcgcctcctcctcctcctcctcctcttgtatttccattatttcttcttcttccggcggaggtgggggcgcacgtctctgtcgacggcgtattggcaatcggtcaacaaatctttcaataatttcgccgcggcgacggcgcatggtttcggttacagcttgaccgttttcgcggggacgtaactcaaatgctccacctctaaatcctgtcccactgaaagtagggatggaagcattggaaggggtgttgggcaatgacacagcacttactatgcattttatgatttgttgcgtaggaactccgcgcaaggagctgagtgtgtccatatccaccggatcagaaaatttttcaaggaaggcatctagccaatcgcagtcacaaggtaggctgagttttgtttgatttgcagaatcagaatggtctccaatgctgctaatgatgtaattaaagtaggccgacttaagacgacgaatggttgtaagaagcactgcgtcttttggaccggcttgttggatccgcagacggtcagccattccccaaacttcgctttgacaccgtccaaggtccttgtagtagtcatgcatcaacctttccacatctacttcgcgctgttcgcggtcagccatacgtgtgctgccatatccttgtaacggttgcaacaaggcaagatcggccaccacgcgttcggcaagtacggcctgttggatttgagctagggtggtggcaaagtcatccaagtccacaaacctgtgatatgctcccgtattaatagtgtagctgcagtttgtcattaccgaccagttaacagtttgcgaacctggctgaacagtttctgtgtagcgtaagcgcgagtacgcacgggagtcaaacacatagtcattgcagacacggactagatactggtagcctaccagaagatgagggggaggttcataatataacggccaacgcaaagtggccggagcaccaggagcaaggtcttccagcataaggcggtggtattcatatatgtatcgagacatccatgtgattccggcggcggtggtggttgcccgagcgaactcgcgagctctgttccaaatgttgcgcaggggtaaaaagcgttgaattgtagccatagtctgaccggtcaaacgagcgcaatcttgaatgctctaaacatagagagaataaaagtccgtaagcgactcccttccgtggcttggtggaaaagtcacaagggtaccatagcgaggaaccccggttcgaaaccggcaggatccgctatgagcgtaagtgaggcgcttgcgcgttgaacccggccaaagacccccagacacggagaggagtcttttttttttttatattttcttagatgcatccagttctgcgacaaatgcgaccccagcccagggtaactacggcctcagcagcggtgccgctttcgggccctggcgaacaggaagagcctcagccttccacgttggagttagaagaaggagaaggcatagcccgattgggcgcccattctcctgagcgacacccacgggtgcagctaactcgagacagccgcgcggcgtttgtgcctcgtcaaaacatgtttcgagacaacagcggggaggaagctgaggaaatgagagactgcaggtttagggccggtcgcgagctgcgccgcggatttaatcgcgagcacctgctgcgcgaggaagactttgaaccaaatgagcgttcgggcattagtccagcacgggcccacgtcaccgcagccaatctagtaacagcgtatgaacaaactgttacagaggaacgtaattttcaaaagagttttaataatcatgtgcgcacactaatagcgcgagaagaagtggcaattggtttaatgcatctgtgggactttgtagaagcttatgtacataatccagcaagtaaaccccttactgcccaactgttcttgattgttcaacatagtagagataatgaaacttttagggacgcaatgctaaacatagctgaaccacagggtcgttggttacttgatttaattaacattctccaaagcattgtagtgcaggaacgcagtcttagtttagctgacaaggtggctgcggttaattactccatgttaagtcttggaaagttttacgcccgcaagatttataaaagtccgtatgttccgatcgacaaggaagtaaaaatagacagtttttatatgcgcatggctttaaaggtactaacattaagcgatgatcttggagtgtatcgcaatgacaaaatccacaaagcagtgagtgccagtcgccgcaaggagctgagcgacaaagaactaatgcatagcttgcaaagggcgctcacgggcgcgggaacagaggaggaggagtcgttttttgatatgggagcagacctccggtggcagcccagcgctcgtgctctggaggcggtcggagcaacaaccgctgatgtcaccgacgagtatgatgacgaagaccagtatgaggactgatgggccgtaccttttgatagatgcagcgaccggcgatcaccacggacgggacccctaacctggatcccgcggtcatggcagccatgcaaagccagccttctggggttacagcttcagatgactggacagcggccatggatcgtatcatggctttaacggcgcgcagtcctgaggcttttcgccaacagccccaagcaaatcgattttcggccattttagaagcagtagtgccttctcgcactaaccctacacatgaaaaagtgttaaccattgtgaatgccttgctggatagcaaagctatccgcaaagatgaagcgggtttaatatacaacgctttgttagagcgggtggcgcgctacaatagtactaacgttcaggcaaacttagatcggatgggaactgatgtcaaggaggcgttggcaaaaagagagcgctttcatcgcgacggtaatcttggctcgctggtggcgctaaatgcttttttgagtactttgccagccaacgttccgcgcggccaagaggattacacaaactttattagcgcactgcggctcatggtcaccgaggtaccgcaaagcgaagtgtaccagtccgggcccgattatttttttcaaacttccaggcagggtttgcaaactgttaatttaacgcaggcttttaaaaatttgcaaggcttgtggggagtccgtgctcctgtgggagaccgctcaaccgtgtccagtttgttaacgccaaactcacgcttattgctgttgctgattgccccctttaccaatagcggtagtttaagtcaagattcataccttggtcacctaattactttgtaccgcgaagccattggtcaagcgcaggtagatgaacagacatatcaagaaataactagtgttagccgagcgctgggtcaggaggacactggcagtttagaggcaacattaaactttctcctaaccaaccgtcgtcaacaagtgcctccgcagtatagtttaaatgcagaagaagagcgtatattacgctatgtacagcaatcggtaagcttgtatcttatgcgagagggcgccacgcccagcactgctttagatatgactgcgcgaaatatggagccgtctttctatgcttccaatcgagcattcattaatcgccttatggattaccttcaccgcgcagcggccatgaacggcgaatactttaccaatgctattttaaatccacactggcttccccctcctggcttttatactggcgagtttgatttacccgaaggaaatgatggctttttgtgggatgatgttacagacagtttgtttagtccagcagccattagtcaccatggcaaaaaggaagggggagatgaaggtccgctgattagttctcgatcaagttctccgtttcctagcttaacaagtattaacagtggacgggacaccaggccgcgactaactggggaaagcgattacttaaacgaccctatgctgcttccagtacgggacaaaaactttcctaacaatggtattgagaggctggtagacaaaatggcccgttggaaaacatacgcgcaggaacgccgagaatgggaggagaaacaaccaaagcctgttccgcctcccaggcaacgctggcagcgccgcaggaaaggagcatatgcttctgaaccagaaagcgacgattctgccgatgatagcagtgtgctggatttaggcggcacagggaacccatttgctcacttgcgtccccagggttacataggtcctctgtattaaaatacatatatataataaaagcatacttactaaggccatggcgaccagcgttcgtcttgttgtttttttccgttagctgaaatgaggcgtgcggtggaactccagccagtggcttttgctgaggcgccacctccctcttatgaaaccgtgatggcagcagcggcagcccaaccttctacactggaagcaccctacgtgcctccccgatacttgggtcctacggagggaagaaacagtatccgttattcagaattatccccattgtatgataccactcgggtgtatctggtggataacaaatcatctgacattgcttcgctgaattaccaaaacgatcacagcaactttttaactactgtggtgcagaataacgactactcccctattgaggccggcacgcagactattaactttgatgaacggtctcgttggggtggggatttgaaaacaatactgcgtaccaacatgccaaatgtgaacgatttcatgttcacaaccaaatttaaagctaaggttatggttgccagggaaaaaaataaagaagatccatccaaagatattttgaagtatgaatgggcagaatttgttttgcctgagggtaactattctgaaaccatgaccattgatctaatgaataacgccattattgagcactacctgttagtaggaagacaaaatggagtgctggaaagcgacataggagttaagtttgacacgagaaactttcgcctgggctgggaccccgagactaaacttattacgccgggtgtttacacaaatgaggcgtttcacccagacatagtactcttgcctggatgcggcgttgactttacagagagcagattaagtaacgttcttggcattaggaagcgccagccttttcaggaaggatttattattatgtatgaggacttagagggaggaaacattccggctcttctggatgtaaaaaagtacgaagacagcctgaagaatgagagcgccataagaggagacaattttactgcgttgatgaaagtcgctacaattgaaccagtggcagcggattccaaagggcgcagttacaacttgcttccagacaaaaaaaatactgagtatcgcagctggtacttggcatacaactacggagactcagaaaaaggggtccggtcttggactctcttaactaccccagatgtcacaggcggctctgagcaggtgtactggtcactaccggacatgatgcaagatccggtgactttccgctcgtcgcgtcaagttagcaactacccggtagttgcggcagaactgttaccggttcacgctaaaagtttctacaacgatcaagccgtctactcgcagctcattcgccagtcaaccgcgcttacacacgtgtttaatcgctttcccgagaaccagatattggtgcgcccaccagccgctaccatcactaccgtcagtgaaaacgttcccgccctcacagatcacggaaccctgccgctgcgcagcagtatcagtggagttcagcgagtcaccatcactgacgcccgccgccggacctgtccctacgtttacaaagcactgggcatagtttcaccacgtgtgctttctagtcgcactttttaaaagtgttataacatgtcaattttgatttcgccaagtaataacacagggtggggcttaggttccactcgaatgtatggaggcgccaaaacaaggtccagccaacatccagtgcgcgtgcgcggtcattatcgagcgccttggggagcacatactcgaggacgcacagggcgcactactgtagacgatgttatcgattccgtagtggcagacgcgcgcaaataccgcagacccgctacctccgccgggtctaccgttgatgcagtcattgacgaggtggttgccaacgctcgagattatgctagacgccgcagacgtcttcgccaccgccgtcgtagaccaaccgctgctatgcgcgccgccagagctttggttcgacgcgccagacgcgttgggcgccgagctatgctgcgggcggcaagacgggctgccacacctactggtcgagcacgcaggcgtgccgcagctgcggcggcaagtgctattgcaaacttagctgctcctcggcgaggaaatgtatattgggtgcgcgactcagtaaccggaatgcgcgtaccagttcgtacgcgtccaccacatccttagaagacaaagagtgactcatgtcctgttatgtatgcccagcatgaccaaacgcaagtttaaagaagagctgctgcaggccattgcgcctgaaatatatggcccatcggaagctaacaataccaaacgtgaaatcaagcatgtaacaaaacgagaaaaaaaagaggaagaagctgcagcgctagcagacggcgtggagttcgttcgctcctttgcacccagacgtagggtacagtggaaggggcggcgcgtaaagcgcattttgcggccgggaaccacagtggttttttctcccggagagcgggcggttatgcgaccgctaaagcgcgagtacgacgaagtgtatgccgaccatgacattctggaacaagcggcgcagcagactggggagtttgcctatggaaaaaaagggcgctatggagacaaaattgccatccctttggacgatggcaatccaacacccagtttaaaggccgttactctacagcaagtattgccagtgcttgggccttcggaagaaaagcgtggaattaaaagggaagccgcggatgaattgcaacccaccatgcaactgatggtgcctaagaaacaaaaactagaggatgtactagagcacatagaagtggaccctagcatacagccagatgtcaaaatacgtcctataaaaaaagttgctcccggtttgggagttcaaacagtggacattcaaattcctgtgaaaaccgcgtttggtgaacctatggaaacccaaacttcgccaatggaaacccaaacttcgccaataaaaacagtagcggacgctagcatgcagacagatccttattacctacctaggctttccaaaaaacgttactacagaaaagcaagtgcgcttttaccaaactacgttctacatccttcaatcgtgcccacacctggatatcgcgggtccacttttaaacgccgagctgcgggctccagccgcaggcagggcccatcccgccgcagacgccgacgcaaagctaatttagttccagctgcagtgcgccgcgttgtacgaagggggcgcacactggttcttccgtccgtgcgttaccaccctagcattctctaataagctgcgctgccgtttttgcagatggctcttacttgccgaatgcgcatacccataccaggatacagaggaagaccccgccggaggagagggctggccggtaacggtcgatttcggcggcgtagcatgcgcagacgcatgaagggcggggttctacccctcctaatccctcttattgctgcggccattggggccgttcccggaattgcttcagtggccttgcaggcttctcgaaaaaattaaacaataaaaacttccaacttattactggtactatgactgttttatgcagactaaatggaagacatcaatttttcgtcgctggccccgcggcacggcacgcgtccgtacatgggtacctggaacgaaatcggcaccagtcagctgaacgggggcgccttcaattggaacagtatttggagcggtcttaaaaattttggctccacaattaaatcatatggcaccaaagcgtggaacagccaaaccggtcagatgctaagggataagctaaaagaccaaaacttccaacaaaaagtggtagatggtctggcttcgggaatcaatggagttgtagacatagccaatcaggctgtacaaaaacagattgcaaaccgcttagagccgcggcccgacgaagtaatggtggaggaaaagctaccccctttacaaacggtgcccgcatccgttccatccaaaggagaaaagcgcccacggccggatgcagaggaaaccctagtaacgcacacagtagagccgccgtcatatgaggaagcagtaaaacagggagcctcagtgttgcccaccacgtaccctatgacaaaaccgattttacccatggctaccagggtgtatggaaaaaatgaacatgcgcctatgactttggaaatcccgcctctgccggaacccactattgccgagccagtgctttcgacaccaccagttgcaacagtgacgcgtccagaagtacggccagtggctgtggccagcttacgaaacccgcgatccagtaactggcaaagcacgctgaacagcattgtggggttgggagtgaaatctctcaaacgccgtcgctgctattaaactaaaaaacaaagagtgttaacatcccatctgtgtatacacctcctatgtcagcgccagaggaccaacgcgcgaatcgcagttaccgccgctttcaagatggccactccgtcgatgatgccgcagtggtcttacatgcatatcgccggtcaggatgcctcggaatacctgagtcccgggctggtgcaattcgcccgtgccacggacacctacttcaccctgggcaacaagtttagaaatcccactgtagctcccactcatgacgttaccaccgatcgttctcagcggctgacactgcgttttgtgcccgtggatcgggaagatactgcttactcatacaaggctcgttttacgctagctgtgggtgataaccgcgtacttgatatggctagttcctactttgacattagaggggtactagaccgcggtcccagtttcaagccgtattctggaacggcttacaactctttggctccaaagggcgcgcccaatgctagccagtggctgactactaatgacaacaagtcccacacttttgctcaagcgccttacatagggagctccatcactaaagatggcattcaagtgggaacaaataccgccaatcccccacaaccagtatatgccgacaagacatatcaacccgaacctcaagtaggcgagagtcaatggaacgcgcctttgcctaacaacgcaaaagcagcaggaagggtgctcaagaacaccacacccatgtacccctgctatgggtcttacgcccgagccacaaatgaaaacggaggacaatcaaaaaataacgaaggggtggaaatgcaattttttgcatccgctgctgacaatcaaaatgatcccagtgttgtgctgtacagtgaggacgtaaacctggaagcccctgacacgcacattgtttttaagccagctgtagcagcagacactgttagttcggaactgctactaggtcaacaagcagcgcctaacagacccaattacattggcttcagagataacttcataggactaatgtactacaacagcactggaaatatgggagtgcttgccggacaggcttcgcagcttaatgcagtggtggacctgcaggacaggaatacagagctgtcctaccaacttatgctagacgctttaggcgaccgcagtcggtatttttctatgtggaactcagccgtggacagctacgatcctgatgtgcgaattattgaaaatcatggggtggaagacgaacttcccaattactgctttccactaggcgctgtggggattgtgaattcctacaaaggtgttaaatacgatgcaaatgcctgggcaaaggataacaacaaagcagataataataacttagcaacaggtaacatcttcgccatggaaataaacttgcaggctaatctgtggcgaagtttcttgtactcaaatgtgggcttgtacttacctgacagcttaaaatacactccgggaaacataaagctgcctgataataaaaacacctacgagtacatgaatggccgtgttacagccccggggttggtggatacttatgttaacatcggagctcgttggtcgccagatgttatggataacataaatccttttaaccaccaccgaaacgcagggctccgatacagatctatgctactaggcaatggcaggtttgtgccttttcacattcaggtgccgcagaaattttttgccataagaaacttgctgcttttacctggttcgtacacgtacgaatggaactttagaaaagatgtaaatatgatacttcaaagcaccctaggcaatgacctgcgggtggatggggcaagcattcgctttgacaacatcgcgctgtacgccaactttttccctatggctcataatacggcgtccaccctagaagctatgttgagaaatgacaccaacgaccagtcatttaatgactacctatgcgctgcaaacatgctgtaccctatcccagccaacgcaaccagtgtgccgatttctataccttccagaaattgggcagcatttaggggatggagttttactcgcttaaaaactaaggaaacaccgtcactgggctctggctttgacccgtactttgtgtactcgggaaccattccctatttggacggtacattttatcttaatcatactttcaaaaaggtgtcaattatgtttgactcctctgttagctggccgggaaacgaccgtttgcttacgcccaacgagtttgaaattaagcgttctgtggatggggaagggtacaacgtggctcaatgcaacatgactaaagactggtttcttatccagatgcttagtcactacaacattgggtaccagggtttctatgtgccagaaggctacaaagaccgaatgtattctttcttcagaaactttcagcctatgagtagacaggttgttgacactactgagtacaaagactacaaacaagtaacagtgaagtttcaacataacaattcagggttcgtgggctacttgggtcccaccatgcgggaaggtcaagcttatccagctaactatccctatcccctaattggaaagaccgctgtggaaagcataacgcagaaaaagtttttgtgcgatcgcgtaatgtggcgcatcccattttccagcaattttatgtctatgggagcgcttaccgaccttggacaaaacatgctgtatgcaaattccgcccatgctttggacatgacatttgaggtggatccaatggacgagcccacccttctttatgttttgtttgaagttttcgacgtggtgcggattcatcagccgcaccgcggcgtcatcgaagcggtatacctacgcacgcctttctctgcgggtaacgctaccacctaagaaggcatcttctcagactgctgttatgggttcaagcgagcaggagctcacggccattgttcgagacctaggttgcgggccctattttatgggtacatttgacaaacgctttccaggttttatatcccgcgaccgcttatcctgtgctattgttaacactgctggtcgcgaaactgggggcgtgcattggcttgcttttggatggaaccccaaatctcatacatgctatttatttgaaccatttggattttctgacaagcgtctaaaacaaatatatcactttgagtacgagggactgttgcgccgcagcgcactagcagccactaaggaccgttgcgttaccctacaaaaatcaactcaaagcgttcaaggaccattttctgcagcttgtggccttttttgctgtatgtttttacatgcttttactcattggcctgaccacccaatggataaaaatccaactatggacctacttactggagttcctaactgtatgttacaaagtcctcaggtagtaggcatactgcagcgcaaccaggaggagttgtatagatttttaaacaccctatccccttactttcgtcacaaccgcgagcgcatagaaaaggctacgtcttttactaaaatgcaaatgaactgaaataaacatgttacacagtgtattaataaaaacatttttattaactcattgattcacaaactggtttttattaaaaatcaaacggttcttcgcgaaagtcgccatgattagtaggtagggatagattcctgtactgcagacgcgggtgccacttgaattctggaataacaagcctaggaagcgggccttcaaaattttctctccacagctggcgcgcaagttgcaaggcgcccataacatcaggagcagatatcttgaagtcgcaattgggcccggcattaccgcgggtgttgcggtaaacgggatttgcacactgaaaaaccagcaagcaaggatagtgaatgctggctaacgcccctgggtcggttacttcgccagtgtcaatgttttctacattgctaagggtaaacggcgtcatcttgcagagttgtcgccccatccgtggtacaccatcttgcttgcttaaacactcgcaacgcactggcataagaacgcgtttctgcccctgtcgcatgtgagggtagtcggccaacataaaggcttcgatctgtttaaaagccatttgggcctttgacccctcagagaaaaacaagccacaggactttccggaaaaagagttgcttccgcagccgacatcatggaaacagcagcgagcgtcatcgtttttaatttgcactacattgcgaccccagcgattttgtaccaccttagctttagacggattctctttcaacgcccgctggccattttcactggttacatccatttctaccaggtgctctttacgcaccatttctatgccatgcaaacacctaagctctccctcccgctcggtgcactgatgctcccacacacagcaaccggtgggttcccaggttttatgttgtacgccggcatatgcttgcatgtatccttgcaagaagcggcccattagctcctggaacgttttttgggatgaaaaagttagctgcaatccgcgcttttcttcgccaatccaggttgcgcatatttttttgtatatgccactctgttctggcaaaaatctaaagttggaacgctcgtcatgatccacatggtacttctccataagcatagccatggcttccatacccttctcccaagccgttactaggggctcgttcgcaggatttcggacaacaaaactttcttcactgcttatttgcattgcggcatttgcggggtttcgtttgttgacctccattttttgataagactgcgacccgtctgcatgaggtataatgcgaacagggggcatgctgaatcccattattcctaagactgcctttggcgtttccactactccttcctcttcttcgctgtctaaaacaatctctggcgacggaggaagaggctttgcggacttcatctttcgttttgaaggcagaggcgcaggagctcccatgtcttcctcgctttcggaatccaaaaagtaacggcccatttttggaggcggcggctgaacactgcgatctggggtgcgctccctctgtgagtgttgattgctggccattatttaatcctaggcaaagaaacacatgatggaactccaaccacagggaagtttaaccaccccaagcgctcccgccatctgcactactgctgtcatggaaaaggaaaacagcctacccataccccaggacgcaccggtggagcaggacttgggctacgtgacgccccccgaagagtggcatcaaccagactctcttctaaaccaaaatcagccaaatgaggaacaggcagaaagcaatgaacaaaatgccgggttaaagaatgactacctaggcgagggagatgtcctgcttaagcatctgcagcgacaaaccactatcgtacgcgacgctatagccgaccgcttgtccttgccaatttcagtttcagagttaagcagtgcatacgagcggaatttgttttccccacgtgtgcctccaaagcgacaagccaacggcacatgcgaaccaaatccccgccttaacttttatccagtttttgcagtgccagaagcacttgcaacatatcatatttttttcaaaaatcacaagatccccgtgtcctgccgagccaaccgcacccgcgcagatgaactttttactttaaggtccggcgccgccatacctggtattgtatccttagaggaggtacccagaatttttgaaggcttgggacgtgatgaaaaacgagcggcaaataccctgcaaaaacaaaacgaacaaagtcagtacggaactagcgccctggtagagctggaaggtgacaacgctcggttggcggtactgaagcgaaacgttgcagtgacccactttgcctatccggcgctaaatcttccaccaaaggttatgagcgcagtaatgaatcaggtattaattaagcttgccaaaccaattgatgaacaagcaaacttgcaagatactgaaacaacggacgatggaaaaccagctgtaagcgacgaacagctatcaaggtggttggggacaaacgatagtaaggaactagaacatcggcgcaaattaatgatgggcgctgtactaataactacagaacttgagtgcatgcaccgctttttttctaacagtaccatattgcgtaaaattgaggaatgccttcactataccttccgccatggctacgtgcgccaagcttgtaaagtgtccaatgtggaattaagcaatctagtttcttacatgggcattttgcatgagaaccggctcggtcaaaacgtcctccactctacccttagcggcgaagcgcgcagagactatgtgcgcgattgcatttatctgtttctactgcacacctggcaaaccggcatgggggtgtggcagcaatgcttggaagagcgaaacttgcaagaactacataaactccttgacaagtcgctgagatgcctttggacaggctttgatgaaagaacggtagctgccaacctcgccgacattatttttccagaaaggctattgattaccctgcaaaacggactgcctgatttcatgagccaaagcatgctgcacaattttcgctcttttattttggagcgatctggcatgcttcctagcatgtgttgtgcgctgccttcagattttgtacctatttactttaaagaatgtcctcctcccctgtggagccattgctacctactacaactggccaactacctagcctatcactcagaccttatgacagactccagcggtgagggtctaatggagtgtcattgtcgctgtaatctgtgcacccctcaccgttccctggtttgtaacacagaactactgagtgaaagtcaacttataggaacctttgaaatgcaggggccgcagtctgacaacaacaccgcaacaagtttcaggctcaccccagggctatggacttcagcgtatctgcgtaaatttgagcccgaagattaccacgcccatactatacatttttacgaagaccaatccagacccccaaaggctccgttaacagcttgcgtcattacgcagggaaagattttagcccaattgcaagctattaagcaagcgcgcgaagagtttttacttaaaaaaggacacggagtgtaccttgacccccaaaccggcgaggaactcaatcttccatcaccttcctgtgctaccacgtactcttcacatccacagcatgcccccgaaagccgccaaacaggccattgctctacaacgttcaaagaaacagcagcaacagcaggaaatctgggaggaagaatcttgggagagtcaggcagaggaggacgaggacttggaagaatgggaggaggaggaggaatacaacagcctagaagaggaggaggaaggtatcgaggacggagcgaccgccacaaaaccgtcgctttcaaccgaggcctccccaccgaaccccacagtgagcaaatctcaaaaagccagccgtagatgggacaacactgaaacaagcaccgcagcctcaaactggggtaagaaccgcaagcagacgcgtcggggctactgctcgtggcgggctcacaaaagtaacattgtggcctgcctacaacactgcggggggaatatctcattcgcaaggagatatttgctattccatgatggagtagcaattccaaggaatgtcctgcattactaccgtaatctttacagccccttcgaagcgcccaacaaagaagcaacctgcggcgaccaagcggtccattagaaaaagaagcaacaacaacatcgaagaaagtcctgagacgcgcgagctaagaaaacgcatttttcccactctatatgctatttttcagcagagtcgaggtcaagaacacgaactgaaaataaaaaaccggtccctgcgttcgctaacccgcagctgtctttacctgaaaagcgaagaccagttgcagcgcaccttggaagacgcagaagctctgttcaataaatactgcgctctctcgcttaaagactaaaaaaaaagcccgcgcgcggactttacaggcgggaaagtgacgtcagcgctatgagtaaagaaattcccacgccttacatgtggagcttccaaccccaaatgggtttggccgcaggtgcggctcaggactactccagcagaatgaattggctaagcgccggtcctcatatgatttccaaagtaaacggaattcgcgcccagcgtaaccaaattctgctggagcaggcggctctcacggccaccccgcgtcatcaattaaaccctccctcttggccagctgccctggtataccaggaaaatcccccgcctactactgtacttttaccccgcgacgcccaggccgaagttcacatgactaacactggggcgcagctcgcgggcggcgcacgtcacagtttcaggtgtaaaggtcgctcctggccctaccccacttcaggtataaagcgactgctcatcagagggaaaggtatacagctcaacgacgaggcagtcacatcgtcactgggtctcagaccagacggagtatttcagctcggaggatccggtcgctcctcctttactacccgccaagcctacctaacgctgcagagctcctcatccgctcctaggtccggcggcatcggaactctccaatttgtggaggagtttactccatcagtttacttcaaccccttttcgggttctccaggccactacccagacgccttcatccccaacttcgacgcagtgagtgaatctgtggacggctatgattaatgtctaatggaacagctgacacagctcggctgcgacatttagaacattgtcgccgacttcgctgctttgcccgagacgtgtgtgattttgtttactttgagctccccgaggaacatccccagggacccgctcacggtgtaagggtaacagttgataaaggaattgatacccaccttattaagtttttcaccaaacgtccacttttggtggaaaaggaccaaggaaacactgtactaactttgtactgcatttgttcagttcctgaattacatgaagatttttgttgtcatttgtgtactgaatttaataaattgtagtggcgctttgtcacctgaagaggaacctaattgtcgtccgcctctaactaatatcaaagttgtactttcaaccactcacgttacccttcaatgcaagtttttttctacacaactcacttggacctttaatggaaaaaacgtcgccgaggcaaatttaaagtaccatatcaacaaagaaaacattaccttgcattcgcctattcacctgggatattaccgctgctttgccacaccttgtgtgcaagcgttttttctggctccagttatcaaccctcgtcctgcaactactgctcagcctgaaaaaattaccaagttgatttccaccgctattgctactactgctacaaaaggtacagaagaaatcatatacttttcaaactttacaactaatttacttttaaattgctcgtgctctaactcacttatttcgtggttcgctaacaacaccttctgcaaagctttttttcaaggaacaactttgtattcggctaaacttgaactttgtaacaccagcactccttctaaccttactttgttacctccttttgttgccggccgttatttctgcataggagcaggcgggcatccttgtcagcggcattggaaattagtttttcgtccaacgctggttttacctacgtctgctgatcctactctgtccccaacccctaatttttggcttgaatacagcggacttatagcttttactttatttttactttgcaatttattcttaattaatttttactaacaatgcttcacatcttaattttgttcttttctctaactcccattgtttatgcccaaacagcagagagaccactaaaggttgtggctgaagctggtcataatgtcacacttcctcatttgctgcctggatttaacaaaactggtcatgtaacttggttaatagaaataccagactatggctcagccccttcaaacaaatttgtttttagcggacaaaagctctgtgagtttgccagcaaaaacctaacgtggtcttttccacaattaatttttaaatgtgacaattatgacattaccctattttggcttaaaattgaaaattcggctatttacaatgtaaaaaacacaatagaagccaccgaaagcaatatatactatcagttaacagtaatacaaattaatccgcccaactgtatcatcacttccaaataccttacagaagattattgtcacattacaattaattgtacaaactctcgctatcctaacaaggttatctttaacaatgtcactagatcttattatggttatgctaaaggcagttctacgcttcccaactactttacaaccagctttaatgtttcaggtatcactaaaacatttaagcataactatccttttagtgagctatgtacttatccgtcttccgaaaatttctacaattcaaaagaaacagtaagcaccatagtctttatagtaataattggctttagtgttcttattattctgggtgccctaatttatctttgttggcatcgcaggtttctttatagatctaaatcagaaccttgtgtacaattaaatgcttactagcttttttttgttttacagtatggtgacggttctcttcatctttttatgcctaccaattatttttgcctcttcaacttttgcatccgtcagtcacatcaatcctgactgtttaactccatttacagtgtatttaatttttgcatttgtaactgctacctgcgtctgcagtcttattaccctgctaattacatccttgcaattttttgattattactacgttcgatttgtttatcgcagacaccacccgcattatcaaaacccccaaattgcagcccttcttcagttgcaaccatgaagttaccgttagccttcctttttttctttgtgccaattagggcaacaccttgtgaattgcacaagccatgggattttttggattgctacaccaaagaaacaagctacataggttggatttatggaataatgactggtttggtttttatttccagtgtaatagctttacaaatgtatccgcgccttgattttgcatggaaacgatacactgatgatcttcccgaataccctaatcctcaagttaatctaccacaaaatattgtgtttccagaacccccacgtcctccttctgttgttagttactttaaactcaccggtggagatgattgaagctgatttagaagtcgatggaagaattaccgaacaaagacttctcaccaatcgcgctaggcaacggcagcaggaacaaaaacacaaagagcttcttgatttgcaaaccgtacaccagtgtaaaaaaggacttttttgtttagtaaaacaagctacactcacttatgagttattatcaggcaaagaacaccagttaagctatgtgttgcccattcagcgccaaacctttactgcaatggtgggttctgtacctattaaagtgtcccaacaagcaggagagcaagaaggctttattcgttgcctgtgtgataatcctgaatgtttgtacactttaataaaaacactgtgcggtttaagaaatcttttaccaatgaattaataaaatcacttaccgaaaatctgaaaatatatcgtggtctccgtgtactcttataagttttccctcttcccaactgtcatacttgacagatttacaaatagcaaacttcctccaaaccttaaatggaatatcagattcttcctcccaacccctacccaccatcttcattttttgtagatgaagcgcagcagagtccagtatgctgaagaaactgaagaaaatgatgacttcaaccccgtttacccttttaacccctctgatacaacaattgtgccatttattacgcccccttttaccacttccaatggccttcaagaaaaaccaccaggagtactagcgttgagctacaaagatcccattgttaccgaaaatggaacccttacacttaaattaggggatggaataaaacttaatgcacagggtcaacttacagctagtaacactgctaaggtactagagccccttaccaacaccacacaaggcattaaactttcttggagcgcccccctcgcagtacgggcaagtgcccttacattaattacaaaagcgcctttggttacagcggatgaaagcttaagcttagtaacaacgcctcccattacagtagagtcttctcgtctgggattggctaccatagcccctcttagtttagatggaggtggaaatttaggtttggatttatctgctcccctggacgttagtaacaacaatttgcatctcaccactgaagcccccttagttataaactctggcggtgccctaactgttgctactacggaaccccttggtgttcgtaacaacactctcaccttatctactatggaacccttaacagtaagcgctaatgggttaggaataaacgttaccagtccaatttcggtggccaatggttccttagccttggccgccgctgctcctcttaacaccacaggatccaccttaggtctttctgttacaaatcctctcactatttcaggaaatgcgctcactgtagccactggcaatggtcttcaagtatcggggtctcaattagtagcaagaataggtgatggtttaaggtttgataatggaattataaaggtatatgccgccgggggaatgagaacttcagatggtaaaataattctagatgtcgactacccatttaatgcaaccaccaacttgtctttaagaagaggtttggggctaatttataatcagtctacaaattggaacttaacaactgatattaacactcaaaagggtttaatgttcattggaaatcagatagctattaatgccggacagggacttacatttaataatcaacaactacaggtaaaattgggagctggacttacttttgactcaaacaataacattgtcctagacaatagcagcggcactgcctacgaccctcttacactgtggacaactcccgaccctcttccaaattgcagtcttcttgaagacttagatacaaagctaacattgtgtttaagtaaaaatggcgccattgtacatggcgtggtaagctttgtgcccgttaaaggtgcgctactaaatttacaaaaccctaccagcattggacttcacattctatttgaccaacatggtgtcttacaaacaggaacaccatcagccatagccccacaggcgtactggggatatagacagggacaatccatatcccctactcctgttaccaacgctctgaaatttatgcctaactccagtgcataccccagagctaacggaagtgaaccaaaaagtcaaacgtttacttctacatatatgcaaggcgacatcgctaaacccatgacaatgaaagtctcgtttaatgccgcttctactgttactggctactctttaagctttacatggacaggtatctcaaactaccgtaatcaagctttttcatgcccatcatgttcattttcttacctagcccaagaataaaaaaatactcacaaagaattattatcatattgtttattcttgttttacacaatgcgcgttgttaaacttccgcctccttcccattttattttatacaccaccctttccccctttatagccgaaaacagctgcatgtgcatgtttctacttaggttcttaggtgtcacagtccaaatagtttccttccgagcaaagcgatgatcaatgatagaaacaaacccctcgcccacacagtcacttaggtaactttccccatccagtaccaggtccatgttgacttcctacagaaacaaaaaacagtcagtgtccatcagcagcccaaggattttcacgttgtccatattcttcaaacagcacaggtcggtggtgcataataataccctttagtaatcgctgacgctgaatttctactcggctatgtttcaaggaacgagaagtacttttcataatgatttgtaaagcttttatcattaataaacgggtgcgacgagcacagcagcgcacacgtatctcacttaaatccttacaatagctacagcataataccagcatgttatttaaaaatccatagctaaatgcactgcatccaaaactcattttttctaacaccaatccgacatgaccatcatacattattttaatataaatcaagtgtttccctctaacaaaaatgcttcccatatacagcacctcttttggcataaaccgattcactacttctctataccaaaagcatcttttattaattaaagacccatacactaccattttaaaccaccatgctaacaaagaaccggctgccttacactgtaatgaacctgggcgattacagtgacaatgaataaaccatctctcataaccatgtaataattgggttctctctacatctatggttgcacagcatatacacacgctcatgtacttctttaatataaacatttcatacctacttaaaatcatatcccatggcactggtagctcttgtaatacagtaaagcatacagatgaaggaatgccccttacctcactaacattatgtaaggttaaactgttacactcagaaactgaagaattctcaggtccaaacaaagaagctctcatctccttttcacaaggtggtaacgggtacttcccgtacggtgccaatctgtacggataccgtctgttgcgctgcattatacagcaaagacttccgcgccttctcgtactttaaataacaaaaccacgtacggccgctgcaagcagcgcctcgtcttctttgtctgcgacgattttgctccgtagtaagggcgtaatataaccactctcgcaaacacagcagaattctttcagcttcaggtgttatcattaggcgatgtcctttaatgcgtagcagagtatccacacaggtcgcatgggctaaaccaagccatgctatgcaagcagccgtgtcccgacttacaggaggaggaggaatacaaggcagaggcataaaaacttaatcaagacggtcagcaaggatttgaatgcgtaaatctcgcaggtggcagcgatcgcctccgctgtgctggtgaaagatcacagccagatcaaattgtaagcgattttccaaatgttcaacaacagcatctaaaagagccacagctctgatttcgataaacaaaagcaaagcaaatgcattatcatgaaactcttctatcatcaaactgcctgactgaaccattcccaggtaattttcattcttccattgttgtattatgtgaacacattgattttgcaggtttaaaccatgaatattaaaaagctctgtaagggcgccctccaccgccatccgcaggcagtacttcatatttgctgaaaaaagtctggatcttcaaacacctgcagtaaattcagtagatttacattaggctccacaccttggtctcgcagctgacaccttaatgccaattgtataaaatcatgcaaatcagaagccagcagcaaagaaagttcacctccaggtacaagttccggagttcccacagaacatacaacttgcacaaatgggcccatattagtaagcgtggcaccaacgtagacatcgcgcataggaggagttaaataatgcattaccagcagccaaaactcaggtagcacgtctttaagaaacgccaccacctcaaaatttaagtcatgcaaatagttccgtaaacactccggaaacaacacagagtaatgaacaagctgcctctgaaacatgctttaggttagcctgaaaaataaaaatatgttaaagtaaagatgcctggcgaacgggtggaaaaataactctacttaaaagcaagcgcgcgactggctgctttgcgcgaacatcgcaaaacacgtcggaatgattaaacagcaaaacactaagctccattcttgagcctggataaagcgtttcagcgccaacaaaaacccctctggcgttcatgtcgctcaatgaaaataatgttcccaaatatccaggaggaatatcaactgctatatgcaaatataaaagcacaactccatgcggaggtataacaaaattcgcaggagaaaataacacataagcgttagaataaccttcttgttcaggcaacatagccccaggtcccttaaaatacacatacagagcctgtaaagcagccataatgccttaccagaaaaaacagtacaaatcccaggcacagcgaacacaatctgccgcaagtgttcgcctttaatactgaaaaatagtgacgtaaatgaccaaagttcacctacacaacacaaaaaacccccaaaagcccgcgaaaaaatacacttccgcatatgactcggcacaatacagtgttctcacgacacgtcacatccggcgcgcccggctcccacgccgcgcccaacttcctcatccgcccaaacttacaaacacgcccaggccacacctccacccaatcaaagtacatcgccacacccacttcattttaatattggctctagtccagtataaggtatatatttagataggggccagtgaattgtaatacgactcactatagggcgaattgggccctctagatgcatgctcgagcggccgccagtgtgatggatatctgcagaattcgcccttccttaattaacctgcag

SEQ ID NO: 3 - DNA, 34044 bp, Adenovirus A31
  MISC_FEATURE (1)..(34044): Complete Genome
cgatcgcgtttaaacaagggcgaattccagcacactggcggccgttactagtggatccgagctcggtaccaagcttgatgcatagcttgagtattctatagtgtcacctaaatagcttggccatcatcaataatataccttacactggacttgagccaatattaaaatgaagtgggcggagtgaatagttaattgaccgtaggcgtggtttgcaagtttgccgaagccggatgtgacgcgtgtgggagccgggcgcgccggatgtgacgcgttagtcgccatttttataggaaatgacatgttttttgggcgttgttgtgtaagttttgtgtttttggcggtaaaagtgatttgcggaagtgaaaactgtttacgtcagttttattataggcgagtaatatttaccgagggcaaagtgaactttgagccactacgtggtggtttcgatacgtgagcgatagggaaactccacgttggtgtccaaaggacacgtttattgttctgtcagctgggtatttaatcccgctgcgtttgtcaagaggccactcttgagtgccagcgagaagagttttctctgcgagctgacatacggcgccattatgagaactgaaataactcctttggtgttgtcctatgaagaagccgatgacatattggagcatttggtggagaacttttttaacgaggtacccagcgatgatgatttttatgttccctcgcttcacgaactgtatgatattgatgtggagtctgccggtgaggattctaatgaacaggctgtgaatgatttttttccggaatcgtttattttagctgctgctgaaggggtaatattaccggagccccctgtgctttctcctatttgtgaacctattggtggtgaatgtatgccacagttgtgttctgaagatatggatttgttgtgttatgaggcggcttttccctgtagcgactctgaaggtgagcaagacgaaaacggaatggcgcatgtttctgcagctgcagcggcggctgctgctaatagagaacgtgaggagtttcagttagaccatccggagttgcctggacatgattgtaagtcctgcgagtaccaccggaatagtactggaaacactgacttaatgtgctctttgtgttatctgcgagcctacagcatgtttatttacagtaagtgcgctatttggacggtgggaggtgtatttttttatttgttcttagcagtaaagacttttttgtttttaggtcctgtttctgacaacgaaccggaacctgacagcactacggatgacaatgagagaccgtcgcccccagaactgggagatgtagttccggaaggagtagtgaaacctgtacctcagcgggtgactgggaggcgacgtgctgtggaaagtattttggatttgatccaagaggaagaatgtgaacaaacagtgcctgttgatttgtcagtgaaacgccctaaatgtaattaatgaactttgcacacctggcaataaaatgggagttttgtgtgagtcacgtataataaactgtttgcgtgttttatttgggcgtggttagtaggcatataaaggtgggttggcgctgcctagcatgagatactgaagaatggagctagaagctgtgttgcaaagttttcagagcgttcgtcagcttctgcagtatacctctaaaaacacttcaggtttttggagatatctgtttggttctactttaagcaaggtggtacatagggtgaaggaagattacagagaggaatttgaaaacatattggccgactgtccagggcttttagcttcattagatctttgccaccactctgtttttcaggaaagagtggtcagatctttagatttttcatcttctggccgaacggttgcttctattgcctttttggcaaccgtgttggataaatggagcgagaggtcccacctgagctgggattacatgctggattacatggcaatgcatttgtggagggcatggctgaagaggagggtttgcatttactcgctggcgcggcctctaaccatgccgccgttgcaggaggagcagcagaacactacgacggaggagtaaacatggaaccacaggtgcaagaaggccatgaacctgaccccgacgaagggcctagttgtgcagttgttaaaaagcgggaaagaaaagaaagtttaaaggaaactgtccttaataggctgactgttaacctaatgtctcgcccgcgcttggaaactgtatattggcaggaattacaggatgaatttaagcagggacacatgcatctacaatacaagtacagttttgagcagctaaaaacccactggctagaaccatgggaggatttagagtgtgctattaaagcttttgctaaagtagctttacgccctgactgtacttataaaatctctaagacagtaactattacgtcatgtacgtacattataggcaatggggcagtagttgaggtggacactagtgatagagttgcttttaggtgtcgtatgcagggcatgggtccgggggtggtaggtttggatggcattacatttatgaatgttaggtttgctggagaaaaatttaagggcattatgtttgaggctaacacaagtgttgtgttgcatggtgtgtactttcttaactttaataacacgtgtgtagagtgttggaataaggtttctgccaggggttgcactttttatgggtgttggaaggccttggtaggtaggcccaaaagtaaaatgtctgtaaaaaagtgcttgtttgagaaatgcgtgcttgctttaattgtagaaggggatgctcacattagacataatgcagcttcagaaaatacctgttttattctactgaagggaatggctattttaaagcacaatatggtttgcggggtgtctgatcagacaatgcgacggtttgtcacctgtgctgatggaaattgtcacactttgaaaactgttcatattgtgagtcatgctagatattgttggcctgtgtgtgaccataacatgtttatgcgctgcacaatacatttgggtctccggcggggtgtgtttagaccttcccagtgtaactttagtcattcaaatgttatgttggagcccgaggcgttttccagagtgagtttaaatggggtgtttgatttatctgtggaattatgcaagattatcaggtatgacgatgctgcccgtcatcgctgccggcagtgcgaatgtggcagtagtcatctagaacttcgccccgtcatgctgaatgtaactgaggagctaagaagtgaccatcttaccctgtcttgtctgcgaaccgactatgagtctagcgatgaagacaactaaggtaagtgggcggagttatgtgggactataaaatgcttaaaggaattgtaaagttgtttttgttattttggcagcgcaatgaacggaactgctggggacaacgctgtgctttttgatggaggggttttcagcccttatttgacgtcaaggttaccgtattgggccggagtgcgtcagaatgtggtaggatctactccagacggacgacctgtagcgcctgcaaattcgtcaacgttaacctatgcaactgtgggaccttcgccgttggataccgccgccgccgctgcagcttctgcggcggcttgtacggctcgcaatatggcagctgattttagtctctacagccaattgacatcgaatgccgcaatgcgcactgcagtccgaggagacattttaactgttatgcttgcaaagcttgagaccttaactgctcagctagaggagctgtcgcataaggttgaagaattagctgatgctaccactcccaccctaccacaacctgttagtcaataaaaaaagctttaaattgtatgctgtttgactgtttattgatgtttgttttttctgacatggtaagctctggaccatcgttccctatcattaagaacacggtgaatgtattccaatattttgtaaaggtgggcttgtatgttaaggtacattggcataagaccatctgtgggatgcaggtaggaccactgtagggcttcttgctcaggggtggtgttgtaaataatccaatcgtagcaacagcgctgggcatggtggtgaaatatatctttaagcaacaagctgattgctaagggaagacctttagtgtaggtatttataaagcggttaagctgggtggggtgcatacggggggacataatatgtagttttgattgtattttgagattggcaatgtttcctgccagatctctcctcggattcatgttgtggagaaccacaaaaacagtgtagccagtgcatttggggaatttatcatgaagtttggaaggaaaggcatgaaaaaatttggagacgcctttgtggcttcccagattttccatacactcatccattattatagcaattggcccgcaagcagcggctttagcaaaaatgttctttggatcagaaacatcatagttgtggtctaacgttaaatcatcgtacgagagcttaacaaatttagggcagagcgttccggactgtgggataatggttccctggggtcccggggcataatttccctcacaaatttgcatttcccaagatttaatttccgaaggcggaatcatgtccacttggggaacaataaaaaaaacagtttctggagcaggtgtgaccagctgggcggaaagcaagttacgcaacaactgagatttcccacatccagtaggtccataaatcaccccaataactggctgcaagtgatagtttaacgaggtgcagctgccgtcgtcgcggagaagcggagccacatcgttcatcatttgcttgacttgcatgttttgcttgacaagttccctgagaaggcgttcaccgcccaaggagagcaactcttgcaaagagttgaaagtttttaatggtttcagaccgtcagccattggcatgtggtccagggtttgttttaacagttgcaagcggtcccatagctgagttatgttttctattccatctcgatccaacagacttcctcgttgcggggattgggctggctgttgctgtaaggaacaaggcgatgagcatccaagtgcaccagggttttgtccttccatggacgtaaggtgcgcgtcagggttgtttcggtcacggtgaacggatgcgcccctggttgggcgctggccagcgtgcgctttaagctggtgcggctggtgctgaagtgtgtgtcttctccctgtgcttcggcaaggtagcattttaacatgagatcataagataaggcatccgtggcgtgacctttagcccgtattttcccctttgaagtgctgccacaatcaggacactgaaggcatttaagggcgtacagtttcggagccaaaaaaacagactctggagcgtaagcatctgcaccgcagttagcacaaacagtttcgcattccaccgaccaggtcagctcaggataagatggatcaaaaacaagtttccctccatactttttgatgcgtttcttaccttgcgactccataaggcggcgtcctttctctgtgacaaaaagactgtctgtgtctccgtatacagatttaatgggtctgtcctttagggctattccacggtcctcctcgtacagaaactctgaccactctgacacaaaggccctagtccaagccagtacaaacgaggccacatgggaagggtaccgatcgttactaattaaagggttggaactttccaaggtgtgtaagcacatatcctcttcttcagcatctatgaatgtgattggtttgtaggtgtaagtcacgtgatcagagttccctggtggggggctataaaaaggggtgggacactgatcttcatcgctgtcttcggcttcgctgtttacgagcgccagctgttgcggtgagtacgcgcgctgaaaggcaggtaacacatctgtactcaaagtatcagtttctataaacgatgaggatttgatgtgcaaacggcccgctgcaatttcttttatgagcccctcttccatttgatcagaaaaaacaatttttttgttatctaattttgtagcaaaggatccgtacagggcgtttgaaagtaacttggctatagatcttagcgtttggtttttgtccctgtctgcccgttcttttgcggcgatattgagttgtacatattcacgagcaatgcatttccaagtgggaaaaacggtggtacgttcgtctggtaataatcgcagacgccacccgcgattatgcagtgtaactaagtctacactggtgaccacttcgccgcgcaagctctcattagtccaggctaaacgaccgccttttcgagagcaaaaaggaggaagaacatccagctggttctcgtctggaggatcagcatccacagtaaaaatgccaggacataaaattttatcaaaataatcaattttggaagtaagattttcaagtgccacctgccactgccgtacggctaatgctcgttcgtaagggttaagaggaggaccccaaggcatagggtgtgtaagggctgatgcatacatgccacaaatatcatatacatatatgggttcctgtataacacctatataggtaggatagcacctgccgccgcgaatgcttgcgcgaacatagtcgtatagttcgtgcgaaggcgccaaaaggttagggcctaaatgtgtgcgttttggtttctctgcgcgatacaaaatttgtcgaaaaagcgcatgagagttagaggagatggtgggacgttgaaacacattgaagtgtgcctgctgaagacccaccgactgattaacaaactgggcgtaggaactgcgcagtttttctaccaataaggtcgtaacgatgacatccagggcgcaatagtttaaagtttccagaataagattgtaatttttttctcctttttttttccatagttcttggtttaggaggtattcctgtttatccttccaatactcctctacagggaaaccatctgcatcagcgcggtaagaaccaagcatgtaaaattgatttatggccttgtagggacaacaacctttttctacaggcagggcataagcttcagcggcctttcttaaagatgtatgagttaaagcaaaggtgtccctgaccattacttttaaatactggtatttaaagtcctggtcgtcacatcctccttgctcccacagcaggaagtcagtgcgctttttgtagtaaggattagggagagcaaaagttatgtcattaaataaaattttaccagctcttggaataaaatttctagagattttaaatggcgccggtacatctgaccgattgtttatgacctgcgcggcaagaactatttcatcaaatccattaatattgtgccccactatgtataactctagaaatcttggctgccccttgatgacaggagcttttttaagctgttcaaaggtcagatcgtcaggactaaccagaccattttgctgttgcgcccactgatgcaactgcggattgttttgtaaaaaagtattccagaggttagcggctaaagacgtttgcaagcgatttctgtaggtacggaattgctgaccgaccttcattttttctggggtaatacaatagaaagtagaggagtctttctcccattggtcccatccaagttctaaggcaagttgtaatgcgtgcgctacaaggctactgtccccagacagtttcattaccagcataaatggtacaagttgctttccaaacgagcccatccaggtgtaggtttctatgtcataggtaataaaaagacgttcagtgcgaggatgcgaaccgaccgggaaaaactggatctcctgccaccagttggaagagtgggcgttaatgtggtggaagtagaaatctcgccggcgagcagagcattcatgtcgatgtttgtaaaagcgtgcgcagtattcgcatcgttgcatgggctgtatgtgttgaatgaggtgcacctgacgaccgcgcaccaaaaagcgcatgggaaaatggatgccacttcttggcagttgccgttcgttgtcttcctgttctgttgcatcgttgtcaccgtttggatccttgaaagtgacaacggaaagggtaacggcgcctcgaccgctgcacgtccatatttcggctcgagcggggctgaagcaggaaatcaaagcttgcagtctggaactgtccatggtatcactcataaaggaaagcgcgtctgcggggaaagcttgcaagttaacttcacaaaggcgggtaagagcaggccgtaggtgaaggtgatacttaatttcaagcggagtgccatcggtagaatctattgcgtgcagtgtgccgtaagcccgaggtgcaattactgttccgcggtgagcaacacgcctgcttaaaagcgacggcgtgcaggaactgggacttccgcttctgcgggagcttgaggcagtcgtatgtcggcctgacgttctggtagtggaaggtgctgagcccgtagttgactggcatgggcgacgacacgacgattgatgttctgaatttgccgacgttgtgtaaacaccactggtcccgttgttttgaacctgaaagaaagttcaacagaatcaatttcagtgtcatttactgcagcctgcctcaaaatttcctgaatatcccctgagttatcttggtaggcaatttctgccattagttgatcaatttcttcctcctggagatctccatgacccgctcgttcaatggtagctgcaaggtcattagatatgcgtcccataagctgtgaaaatgcgttaagtccagtttcgttccagacgcggctgtacacaactcctccgtcgctgtctctggcacgcataaccacttgcgccaagttaagttccacgaagcgcgcgaacacaccgtagttgcgtaaacgctgaaacaggtagtttaaggtagtagctatgtgttctgaaacaaaaaaataaagaatccaccgacgaagcgtgagctcgttgatgtctcccagagcttccaaacgttccatggcttcgtagaagtcaactgcaaaagtaaaaaactgggagtttcgagctgcaacagttaattcttcttctaaaagacgaataatttcagccaccgtgtggcgcacttcaagcgcgaaagcctccggggcttcttcttcctgttcctcttctacttccattgtttcttcttgaaccgcgggcggagagggtagccttcttcgtcgccggcgaacgggcagcctgtctacaaacctttcaatcatttcgccccggcggcggcgcatagtttccgtcactgctcgaccattttcacgcgggcgaagctcgaaaagtccaccccttagttgtagggtaggaaatgcgttgcgaggtgcgtttggtagcgacacagcacttactatgcattttatgatttgttgcgtagaaactccgcgccaggacctaagcgactgcatatctactgggtcggaaaacctttcaaggaaggcgtcaatccagtcacagtcacaaggtaggctaagttttgtttgctgtgaatcaccgggatgttgaactatgttgctaatcatgtaattaaaataggctgttttaagtctgcggatggttttaagaagcaccacgtcttttggtccggcttgttgaactcgcaggcggtctgccattccccacacactactttgacaacgtccaagatctttgtagtagtcgtgcatgagcctttccactggtatttcgcggtcttggcgatcagccatgtgcgttgcaccatagccttgtaatggttgcaataaagctaaatctgcaactacccgttcagcaagtactgcctgctgtatttgggtaagagtattttcaaagtcatccatatctacaaagcggtggtaagctcctgtattaatggtgtaactgcagttggtcattactgaccaattaacagtgtggacacctggctgtatggtttctgtgtatcgtaagcgcgagtaagctcgagagtcaaaaacataatcgttgcaagcgcgcaccaaatactgatagcccactagaaaatgaggaggaggttcttgatataacggccaccgaagtgtagccgccgcaccgggagcaaggtcttctaacatgaggcggtggtattcatatatgtatctggacatccacgtgatgccggcggcagtggttgttgcccgggcaaactggcgaacttggttccaaatgttgcgcaggggtaaaaagcgttcaatggttgggacgctttgaccggtgaggcgtgcgcagtcttgaatgctctagatgtaaagaaaatgaaagtcggtaagcgactcccctctgtggcctggcggaaaagtcacaagggtaccacagcgaggaaccccggttcgaaaccggcaggatccgctgtgagcgtatatagggcgtctgcgcgtagaacccagccaaagacccccagacacggagaggagtcttttgcttttttttagatgcatcccgtcctgcgacagatgcgacctcaatccagggcacccacgccctcaggaccaatagcgcttgggggctctggcgaacctgaagagccttccacgttggagttggaagaaggagaaggcttagcccgtctgggcgctcactctcctgagcgacacccaagggtgcagcttactcgcgatagtcgtgcggcgtttgtgcctcggcaaaatatgtttcgagataacagcgggcaggaggctgaggaaatgagagactgtagatttagggccggccgcgagctgcgttgcggacttaatcgcgagcgactgctacgagaagaagattttgagcctgatgaacgttctgggattagtcccgcgcgagctcatgtttccgcggccaacttagtgtcagcctatgaacaaaccgttacagaggaacgtaattttcaaaaaagctttaataatcacgtgcgcacgctaattgcgcgtgaagaagtggctattggtttaatgcatctttgggactttgtggaagcgtatgtacataatccagcaagcaaacctttgactgctcagctttttttgatagtacaacatagtagagataatgaaacatttagagacgcaatgcttaacattgctgagccacagggtcggtggctacttgatttaattaatatcttgcaaagtattgtggttcaggaacgcagtctcagtttagcagacaaagtggctgcggtcaattattccatgttaagtttgggaaagttctatgctcgtaagatatacaaaagtccatatgttcccattgacaaggaagtaaagatagacagtttttacatgcgcatggcgttaaaggtactaacattgagcgacgatttgggagtataccgcaatgatcgaatccacaaagcggtgagcgcaagtcgtcgaagagaacttagtgacaaggaacttatgcatagcctgcaaagagcgctaacgggagccggaacagaggacgagtcctttttcgatatgggcgcagatctaaagtggcagccaagcgcccgcgccctggaggcggctggccaggataatgatgatgatgatgatgatgacgaagaccagtacgaggactgaccgggccgtaccttttgttagatgcagcgaccggctatcatcacggacggggcccgtaacctggatcccgcggtctcggcggccatgcaaagtcagccttctggagttacggcttcagatgactggacagcggccatggatcgtattatggctttaacggcgcgcagtcctgaggcttttcgccagcagccgcaagctaatcgattttctgccattttggaagcagtagtgccgtctcgaactaatcccacccatgagaaagtgctaaccatagtgaacgctctgttggacagcaaagctatccgtaaagatgaggctggtcttatatacaatgctcttctggagcgcgtggcgcgctacaacagtaccaacgtacaggctaacttggaccggatgggtatggatgtaaaggaagcacttgcgcaacgagagcgatttcatcgcgacggcaatcttggctccctggttgcgctaaatgcctttttaagctctcagccggctaatgttccgcgcggtcaagaagattacacaaactttataagcgctttgcgcctgatggttactgaagttccacaaagcgaagtgtatcagtctggtcctgattatttctttcaaacttccaggcaggggttgcaaaccgtaaatttaagccaagcttttaagaatttgcaaggcctgtggggggtacgcgctcctgtgggtgatcgctcaactgtctccagtctgttaacgccaaattctcgattattattgttgttaattgccccttttaccaacagcgatagtttaagtagggattcgtatctaggtcacttaattactttgtatcgcgaagccattggtcaagcgcaggtagatgagcaaacgtatcaagaaataaccagcgtgagtcgcgctctgggacaggaggatacaggcagtttggaagccacgcttaactttttactaacaaaccgccgtcagcaagtgcctccgcaatacagtttgaatgcagaagaagagcgcatactgcgctacattcagcaatcagtgagcttgtatttaatgcgcgaaggcgcaacgcccagtgccgctttagatatgactgcgcgcaacatggagccgtcattctactcttccaatagagcatttattaatcgtttaatggattaccttcaccgagccgcggccatgaacggagaatactttaccaacgcgattttaaatccgcattggttaccacctcctggtttttatactggagaatttgatttaccggagggaaacgatggctttttgtgggatgatgttacagacagtctgttcagcccggcagccattggtcaccatggtaaaaaggagggagcagatgaaggtccgttactaagctctcgggcaagttcgccgtttcccagcctaagcagtattaacagcggtcgtacaacaagaccgaaactatcaggggaaagcgagtatttaaatgatcccctgttacgtccagcacgcgacaaaaattttccaaataatggcatagagagcttagtagacaaaatgtctcgttggaaaacgtatgcgcaagagcggcatgaatgggaagagagacaacccaaaccggtgccccctccgagacaacgctggcaacggcgtaaaaaaggagcgcatgcgcttgacgaaggaagcgatgactcagcagatgacagtagtgtgctagacctaggagggacagggaacccatttgctcatttgcgtccgcaaggtcaactagggcggttgtattgaacaaaataaaagcactcttaccaaagccatggcgaccagcgttcgtcttatttgttttttccgttagctgcaaaatgaggcgcgcggtggaactgcagacagtggcttttcccgaggcaccaccaccctcttacgaaaccgtgatggcagcagctcaaacttccgcactggaagctccctacgtgcctccccgctatttggctcctacggagggaagaaatagcattcgttattcagaattgtcaccgttatacgataccactcgagtgtacttagtggacaacaagtcttctgatatcgcttctttaaactaccaaaatgatcacagcaactttctaaccactgtagtccaaaacaacgactattcccctatagaagccggtacacaaactattaattttgacgaaaggtcccgatggggcggtgatttgaaaactattttgcatactaacatgcccaacgtaaatgattttatgtttacaactaaatttaaggccagggtaatggtgtctagaaaaaaagatagtgaagaccagtccaaagacattttgaaatacgagtgggcagaatttgtgttacccgaaggtaactactcggaaaccatgactatcgacttaatgaacaacgcaatcatcgagcattacttgcgagttggccgtcagaacggtgtgctagaaagcgacattggagttaagtttgacaccagaaactttcgcctgggttgggaccccgaaactaaattagtgactccgggagtgtatactaacgaggcttttcatccagatatagtattgctaccaggatgcggagtggacttcacggagagcagattaagcaacatgctgggaatcagaaaaagacagccttttcaggagggttttgttatcatgtatgaagacttagaagggggaaatatcccagcgcttttagatgttaaaaaatacgaagacagcttgcagccagacaacaccgtaagaggtgacaactttattgccttaaacaaggccgcaaaaatcgaagcagtcgaggctgattccaaaggccgaagttacaacttgcttcccgacaaaaaaaatactaagtaccgtagctggtatttggcatacaactatggagatccagaaaaaggtgttcgttcttggactcttctaacaaccccagacgtgacaggcggttccgagcaggtctattggtcgcttcccgatatgatgcaagatccggtgacttttcgctcctcgcgtcaagtcagcaactatccggtagttgcggccgaactaatgccggttcacgccaaaagcttctacaacgaacaagccgtctactcacagcttatccgccagtcaaccgcgcttacacacgtgtttaatcgctttcccgagaaccagatactagtgcgtccaccagctgctaccatcactaccgtcagtgaaaacgttcccgctctcacagatcacgggaccctgccgctgcgtagcagtatcagtggagttcagcgagtcaccatcactgacgcccgccgccggacctgtccttacgtttacaaagcactgggcatagtttctccacgagtactttctagtcgcactttctaaaaagtgtacaaacatgtccatcttggtttcgccaagtaacaacacgggctggggattgggagctggccgcatgtacggaggagctaaaaccaggtccagccaacatccagttcgcgtccgcggacactatcgagcgccatggggagcacatacccgcggacgcactggtcgcaccactgtggacgatgttatcgactcggtcgtagccgatgctcgaaaataccgtccaccagccaatacagcagggtctaccgttgatgcggtcattgatgaggtagtggcaaacgcacgagcttatgccagacgtcgcagaaggccgcgtcggcgccgacctactgctgctgtgcgtgcggctagagcgttagtgcgacgcgctagacgcgtcggacgtcgagctatgctgcgagcagccaggcaagctgtaacgcctgccggtagagcgcggagacaggccgcagctgcggccgcaacagctattgccaacctagccgctcccagacgaggaaatgtgtactgggtgcgcgacgcggtaactgggactcgagtcccggttcgtacgcgtccacctcacccttagaagacaaagagttgattgataacctgttatgtatgcccagcatgaccaaacgcaagttcaaagaagagctgctgcaggccgtcgcgcctgaaatatacggcccagcggattacattaccaagcgcgaaatcaagcatgttaaaaaactggaccaaaaaaaagaggaagaaatggccgcagcgctagcggacgaagtcgacttcgtgcgctcctttgcgcccagacgtagaatacagtggaaagggcggtcagtaaagcgagttttgcgacccggcactacaatagttttttctcctggggagcgaacggctatgcgccccctcaagcgcgaatacgatgaagtgtatgccgatgatgacattttggaacaggctgcccaacaggctggtgaattcgcctatggaaaaagaagccgttacgacgacaaaattgctattcctttggacgagggaaatcccacacccagtttaaaggctgtcactttacagcaagtattacctgtgctcgcgacctcagaagaaaagcgaggcataaaaagggaagctatgaatgacttacagcccacaatgcaacttatggtgcccaagcggcaaaagttagaggacgtactagagtacatgaaggtggatcccaacattcagccggacgtaaaaatacgtcccataaaaaaagttgccccaggattaggagtccaaacagtggacatccaaattcccgtacaagctgcgcaaagtaaaactatggaaacccagacttcgccaataaaaacagcagtggacagcggcatgcaaaccgagccttggtacccgccaacttttacaagaaaaaaacgccactacaaacaaacaaacgcgctcttgccagaatacgtgctacatccttccattgtgcccacgccggggtatcgcgggtcaactttccagcgcagagccctagtttatagtcgcagaagaactccgtcgcgacgcagacgtcgacgcagagccaatttagctccagcatcagtacgccgcgttgtacgaaaagggcgcacactgacgcttccatctgtgcgttaccaccctagcatactctaataagctgcgctgccgttttacagatggctcttacttgccgaatgcgcatacccattccaggatacagaggaagatctcatcggaggagagggctgaccgggaacggtcgatttcggcgacgtagcgcgcgcaggcgcatgaagggcggggtacttcccctgctaattccacttattgccgcggccatcggagccgtacccggaattgcttcagttgccttgcaggcttctcgaaaaaattaaattaaaatcaaaagaaataaaaaaggaataacttccaacttattactggtactgtgactgttttatgcagactaaatggaagacatcaatttttcgtcgctggccccgcgacacggcacgcggccgtatatgggcacctggaacgagatcggcaccagccagctgaacgggggcgccttcaattggaacagtatctggagcggtcttaaaaattttggttccacaattaagacatatggctccaaggcgtggaacagccaaaccggccagatgctaagggacaagttaaaagaccagaacttccaacaaaaagtggtagacggtctggcttctggaatcaatggagttgtagacatagctaatcaagctgtgcagaaacagattgccaaccgtttagagccgcgacccgacgaagtaatggtagaggaaaagttaccgcctctggaaacggtgcccggatcagttccgtccaaaggagaaaagcggccgcggccagatgcagaggaaactctagtcacgcacaccatagagcccccttcttatgaggaagcagttaaacaaggagcagctttggcacctactacttatcccatgaccaagcctattctacccatggctaccagggtgtatgggaaaaatgaaaatgcgcctatgactctcgagattcctcccttgccagaacctactgttgcggaacctgtggttactgctccgattgtttcaactgtatcgcgtccagaagtgcggcctgttgccgtagcaagctcacgaaacccgcgatccactaattggcaaagcaccctaaacagcattgtgggactgggagtaaagtctttaaaacgcagacgctgctattaacattaaacaaaacatagtgttaactcccgtctgtatacgcctctatgttagcgccagaggaccaacgctcgaattgcagttattaccagcgctttcaagatggccactccctcgatgatgccgcagtggtcttacatgcacatcgccggtcaggacgcctcggagtacctgagtcccggtctggtgcaattcgcccgcgccacggacacctacttcaccctgggaaacaagtttaggaatcccactgtggctcccacccatgatgtcaccaccgaccgctcgcagcggttgacgctgcgttttgtgcccgtggatcgggaagatactgcttattcttacaaggctcgctttacgctggctgtgggggacaatcgcgtgcttgacatggctagctcttactttgatattagaggggtgctggatcgcggtcccagttttaagccttattcgggtaccgcctataactctttagctccaaagggcgcgcccaatgccagccaatggctaactacaaacaatggcaacaaaactcacacttttgctcaagcgccttacataggagactctatcagtaaagacggcattcaagttgggacaaacactgccaatccccagcaagcagtatatgccgacaaaacataccagccagaacctcaagtaggcgaaagtcaatggaacgcttcagtatctaacaatgcaaaagcagcaggaagggtgttaaaaagcactacgcccatgtatccgtgctatgggtcttatgcacgagcaacaaatgaaaaaggaggtcaatcaaaaaataacgacggtgtggaaatgcgattttttgcatccagtgcgaatgacaatcaaaatgatccaactgttgtaatgtatagcgaggacgtaaacttagaggctcctgacacacacattgtttacaaaccagctgtaactgcggacactatcagttcagaactcctcctaggacaacaagcagcacctaacagaccaaattacattgccttcagagacaattttattgggcttatgtattacaacagcactggaaacatgggagtacttgcaggacaggcttctcagctcaatgcagtggttgatctgcaagataggaacacagagctgtcctaccaacttatgttggatgctttaggcgatagaagccgttatttttccatgtggaattctgccgtcgacagctacgatccagacgtgcgaattattgaaaatcatggtgtggaagacgaactgcccaattactgttttccgttaggggctgtaggcgttgtgaattcatacaaaggtgtgaaacaaaatgacggaaatggttgggtaaaagatgacagtgtagcagataccaatgacatagccaaaggtaatatatttgccatggaaattaacttacaggcaaatttgtggagaagttttctgtattcaaatgtggggctgtacctgcctgacgacttgaaatacacccccgggaacataaaacttccagaaaacaaaaacacctacgagtacatgaacgggcgcgtgactgttcccggtctggtagacacctacgttaacattggcgcgcgctggtctcctgacgtaatggataacataaacccttttaaccaccaccgaaacgcagggttgcgctataggtccatgttactgggcaacggtagatttgttccgtttcacattcaggtacctcagaaatttttcgctattaagaatttgctgctgttaccagggtcctacacttacgagtggaacttcagaaaagatgtaaacatgatacttcagagcaccctgggcaatgatcttagagtggacggagccagcattcgctttgacaacattgccctgtatgcaaacttcttccccatggctcacaatacagcttctacattggaagccatgctgcgaaatgacaccaatgaccagtctttcaacgattacttgtgcgcggcgaacatgttgtatcccattccagcaaatgccaccagcgtgcccatttcaataccttcgcgaaattgggcagccttcagagggtggagttttactcgccttaaaactaaagagacaccttctcttggttcagggtttgacccctactttgtttactctggaaccattccctacctggacgggactttttacctgaaccacacttttaaaaaggtgtcaatcatgtttgactcctctgttagctggcctggaaatgacaggctgttaacaccaaatgaatttgaaataaaacgttctgtagacggggaaggctacaatgtggcccaatgtaatatgaccaaagattggtttctagtacaaatgctcagtcattataatattggataccagggtttttacgttccagagagctacaaagaccgcatgtattctttcttcagaaactttcagcccatgagcaggcaggttgtagacactactgaatacaaggagtataaaaaagtaaccgtggaattccagcataacaactcagggtttgtgggatacctgggtcctactatgcgcgagggacaagcttatcccgcaaactacccctatcctctcataggaaaaaccgctgtacagagcgtcacacaaaaaaagtttctctgtgaccgtgtgatgtggcgcattccattttctagcaattttatgtcaatgggggcgttgacagacctcgggcaaaatatgctgtatgcaaattcggcccatgcgttagatatgacatttgaagttgaccccatggaagagcccacccttctttatgttttgtttgaagttttcgacgtggtgcgcattcatcaaccacaccgcggagtcattgaagcggtctatctgcgcacacccttctccgcgggtaacgccaccacctaaagaaggcactttcccagatcgctgtaatgggttcaagcgaacaggagctgacggcgattgttcgagatctaggctgtggaccctattttttgggtacctttgacaaacgttttcccggttttgtgtctcgcgaccgcttatcatgcgctattgttaacactgccggtcgcgaaactgggggcgtacactggctggcctttgcatggaatcccaaatcgcacacttgctatttattcgatccatttggattctctgatcagcggttaaaacaaatctatcagtttgagtacgaaagtctgttgcgccgtagtgcgctagcggccactaacgaccgatgcgtcaccctagaaaagtcaacacaaactgtacaaggaccgttttctgcagcgtgcggcctgttttgttgtatgttcttacatgcttttactcactggcctgaccatccaatggataaaaatcccactatgaatctactaactggggttccaaatagtatgttacaaagtccgcaggtggaggacacactgcggaggaatcagcaagaactatatattttcttaaacaaattgtcaccttactttcgcaacaaccgccagcgcatagaaaaagccacctctttcactaaaatgaaaaattgatacaaatacacatgtacgtaatgcattaataaacaattttattagagaattgattacaagactgtttttttttttttattttattaaaaatcaaacggttcctctcgagaatcgccatggttggtgggcagggctatgtttctatactgcaaacgtggatgccacttgaactctggaataacaagcctaggaagcgggccttcaaaattttctccccatagctgtcgcacaagctgcaatgcacccatgacatcaggagctgatatcttgaagtcgcaattaggaccggcgttaccgcgggcattgcgataaactggatttgcgcactgaaaaaccagcaaacatggatacttaatactggccagggctccagggtcgctgacttcgttaacgtcgatgttttcaacattgctgaggttaaatggagtaattttacacagctgacgccccatgcgcggcaggccatcttgcttgtttaaacattcacaacgaactggcatcaggaaccgcttctgcccctgtcgcatgtgagggtagtcggccaacataaaagcctcaatttgcctaaaagccatttgagccttcgttccttctgaataaaacaaaccgcatgactttccggaaaaagaattattcccgcagccaacatcattaaaacagcagcgggcgtcatcatttttaatttgaactacattacgcccccagcggttttgcactaccttggctttagatggattttctttcagagctcgctgcccgctctcgctggttacatccatctctatcaagtgctctttgcgcaccatttccatgccgtgcaggcatctaagctccccttcgcgttcagtgcactggtgctcccatacacagcaaccagttggctcccaggcattttgttgaacaccggcataggcttgcatatatccttgtaggaagcgtcccataagctcctgaaaggttttctgggatgaaaaagttagctgcaacccgcgtttttcctcatttagccatgttgtacaaatttttttgtacaccgctccctgatctggcaaaaacctaaagctggcacgctcgtcgtgatccacatggtacttctccatcagcatagccattgcctccatgcctttttcccaagctgatatcagaggctcgctcgtggggttgcgaactattactacgcctttttgttctttgccttccatgttttgagcagcggcctttaaaatgcgcacctgcctttcttccattttttgaaaagactgagaaccgtctgcatgatgcataatgcgaacaggaggcatgctgaaacccatgactcctaagactgcatttggcggctcggtttcttcttctttttcgctctccggagatagagggatggtagccatggacctcctggcttttttctttggaggcaaaggcacagcctccaggtcttcttcgctttctgattccaaaaagtaccgacccatttttggaggtggcggctgagtgttgcggtctggggtgcgctccctctgtgagtgctgattgctggccattatttaatcctaggcaaagaaacacatcatggatccgcagtcaaaggaaaacttaaccgcccccaccgatactgctgttgctgccatggaaaagaacaaatgtctactcataccccaagatgcaccgcttgcgcaggactcgggctacgtgactccccccgaggaattggaaggctctcttctaatccaagagcaaccaaataaggaacaggcagaaagcaatgagcaagacgctgagctccatgactacctaggcaagggagatgtcttgcttaaacatttacagcgacaaagcattatcgttcgcgacgccgtagctgaccgctctttattgccagtctcaatcgcggaactttcttgcgcatacgaacgcaacctgttttctccccgtgtgccgcccaaacgacaagccaatggtacctgcgaaccaaatcctcggctgaacttttacccggtttttgcgataccagaagctctggcaacataccacattttttttaaaaatcatagaatacctctgtcttgccgagccaaccgcagtcgcgcagataagctccttacccttagcggtggtgcttccatacctggtatagtgtccttggaagaggtgcctcggattttcgaaggcttggatcgcgatgaaaagcgagcagcaaacgccctacaagcagaaaacaagcaaaatcaaagtgcgctcatagaactagaaggtgacaatgcccgtttggccattttaaaacgcaatgttgaagtaactcacttcgcatacccggcagtgaatcttccgccaaaggttatgagcgcagtaatgaatcaactactaattaagcgcgctcagcccattgacaaagatgcaaacttgcaagattcagaggcatcagatgatggaaaaccagttgtaagcgacgagcagctaattaagtggctgggaacagacaaccccgccaaactacagcagcggcgtaaacaaatgatggcggcagtacttgtaacggtggaactggagtgcatgcaccgttttttttccaacgttagcacgttgcgcaaaattgaagaatgtctccactacacctttcggcatggttatgtgcgccaagcctgcaaaatttccaatgtggagctaagcaaccttatctcatacatgggtattttgcacgaaaacagattgggacaaaatgtgctacattcaacgctacgcgacgaagcgcgcagagattacgtgcgggactgtgtttatctttttttgctacatacttggcaaaccggaatgggggtgtggcaacaatgcttggaagaaactaacctcagagaactcaacaaactgcttgacagagcgttgaaatcattatggacaggttttgacgagagaacggtagcggcagatttggcaaacattatttttccagaaaggctcatgataaccttgcaaaatggtctgcctgactttatgagtcaaagtatgctgcataattaccgttcttttatattggagcgatctggcttgttacctagcatgtgctgtgcgcttccttcagattttgtgcccattcattttagagaatgtccccctcctctgtggagtcactgctacttgttcaaacttgccaattacttagcttaccactcagaccttatgacggattccagcggagaaggattaatggagtgtcactgtcgctgcaatttatgcactcctcaccgttctctggtgtgtaataccgaactgcttagtgaaagccaggttattggtacgtttgaaatgcaaggaccgcactctgatagcaatctcaccacaaacctgaggctgacacctggcctttggacttccgcttacctgcgcaaatttgaacccctagattaccacgcacacgttattaatttttatgaagatcagttaaagccccctaaagcgccactaacggcctgcgtcattacgcagggaaaaattttagcccaattacaagccattaaacaagcgcgcgaagaattcttactcacaaaaggacgcggagtgtaccttgacccccagaccggcgaggaactgaaccttccatcacctctgtgtgctactgcatcctctccccattcgcagcatgtccccgaaaaccgcaaaacaagctattgcgcagcaacgctcaaagaagcagctacaacagcaggaaatctgggaggaagattcttgggacagtcaggcacaggaggaccaggacttggaagaatgggaggaggaaagcctagacgaggatccagaggaggacggttccaaggacggagcgaccgccgcaaaaccgtcgctttcaaccgaaccctctccagtgaaacacactgtcaacaaatctcagaaagcgagccgtagatgggacaccactgaagccagcgtcgtaaacatgggtaagaaatgcaagcaggtgcggcggggctactgctcatggcgggctcataaaagtaatatcatagcctgcttgcaacactgcgggggaaacatctcatttgcaaggcggtatctgctctttcacgatggagtggcaattcctaggaatgttctccattactaccgtcatctctacagccccttcgaagagatccacaaagaatcgacgtcttacggaccagcggcccactagaaaaaccggcagcagcaacaaggaaagtccagaggcgcgcgagttaagaaaacgcatttttcccactctatatgctatttttcagcagagccgaggccaagaacacgaactgaaaataaaaaacagatccctccgttcacttacccgcagctgtctctacctcaaaagcgaagaccagttgcaacgcaccttgcaggacgctgaagctctgttcaataaatactgctccctctcgcttaaagagtaaaaaaagcccgcgcgcggacttctgacaagcgggaaagtgacgtcacatttataacaggatgagtaaagatattcccacgccttacatgtggagttttcaacctcaaatggggctagcggcgggtgcggctcaagactattctactaaaatgaattggttaagcgccggcccacatatgatttcccaagtaaatggaattcgcgcccggcgaaaccaaatgctactacaacaagccgctctcaccgctacaccgcgtaaccagcttaacccaccctcttggccctctgccctattgtaccaggaaagtccccctccaacaacggtacttttgcctcgcgacgcccaggccgaagtccgcatgactaatgctggcgcacaactcgcgggcggcgcacgtcatagtttcaggtataaaggtcgccctgggccgtactcatcttctgctataaaaacaatacgcattagaggaaaaggtattcagctgaacgacgaggcaacatcgccactgggactcaggcccgacggagtgtttcagctggcaggctccggccgctcgtccttcactactcgtcaagcctacctaacacttcagagttcgtcaacagctccaagatccggcgggattggaactcttcaatttgtggaggaatttactccatctgtttactttaatcccttttcgggctcgcctggacactatcctgacgccttcatacccaactttgacgccgtgagcgaatctgtggatggttatgattaatgtctaatggagcggccgacagagcgcggctgcgacatttagaccactgtcgccaacctcgctgctttgctcgagacatctgcgagtttacttactttgagctgccagaggaacaccctcagggaccagctcacggcgtaaggataacagttgaaaaaggaattgatacacacctcattaaattttttaccaaacgcccgctattggttgaaaaggatcaagggaatactgtactaactctatattgcatttgtcctgcccccggattacatgaagatttttgctgtcatttgtgtgctgaatttaatcatttgtagtggcggtttaccgcctgaagaagaacctaactgtcatccgcctcttagtaacattaaaattaacctttcaatctctgacattactcttcgctgcaattttttctccacccatctcacctggagttttaacggaaaacccatcgccgaggtaaaattaaagtttcagctacacaaagaaaacatcactttatttgcacctattcacctgggatactaccgctgcgcagctccaccctgtcagcaagccttttttgtttctccgattattaacagaaaacctgctacaacaacacctgtcactcggcaaaacatccagacgacttctcctactaaaggtatagaggaaattgtgtacttttcaaactttacaaaccacttacttttaaactgttcctgctctaactccttaatctcatggtttgctaataacactttgtgtaaagctttttaccaacaaaaacttttgtattctgccaatttaacactgtgtaaccaaaccacttcttcccaccttactctactaccaccttttgtcgctggtcgttatttttgcttaggagctgccggtactagcccctgtcaacagcactggagattaacttatcgcccaacgccagtaacgccttctgtaataacagaggcatttacctctaataccttgcttctatatagtggtcttgtggctcttactctatttctaatttctaacttgtttctagtgcagcatttgtatttgtactaatcatgcttagtattttagtctttgtttttttacctttcctcctacatgctcaaacatctgagaaaccattgaaagtatttgtggaagttggccataatgtaaccctcccccatctcatgcctgattcacacgaaacaggccatgtgacttggctagtagaaacagcagattacggtgtagcttctccaaacaactttatttttagtggacaaaaactatgccagtttacttccagaactatggtgtggccttatgccaatctagattttaactgcgctaattatgacctccatttgtttcggcttaaggtagaaaattcagccatttacaatgttaaaaataccatcaatgcatctgaaatgaatatctactatcaattaacagtaattgacattcttccacccaaatgcatcattacttcaaagtacctcacaaataattattgtcacattaccattaactgcaccaactcggtgtatccaaacaaagttcagtttaataatgtcactcgattctactatggatacgccaagggaggcccaaacctacctaattatttcaccactaattttaatgtatcaggtattactaaaagctttaaccacagttacccttttaatgagctgtgtgatgaccccgtgttccaacctcagaataatttaaaaaacacggtgattttcttagtaataattgcatttagcgttctcattattattgcagccctcacttacctgtgctgtcacaaacagacttaaatcttatagcttttttttttttccttacagtatggtgacggttcttcttatattcttatgcctgccaatcattttttcttcttcaacttttgcagcagtgagtcacattgatcctgattgtatagcaccctttgcggtgtatttgatttttacatttgtgaccgccacgtgcgtctgcagtcttataactttacttcttacctcgcttcaattttttgattactactacgtgcgatacgtttaccgcagacatcaccctcgttatcaaaacccccacattgcagctcttctccatctacaaccatgaaagcagcgttagccatcttcatgttaactccaatgttggccacttcttgtaagcttcacgtgccatggactttcttagactgctacaccaaagagacagattacataggctgggtgtatgggattatgtctgccttagtttttgtatcctctgtagtttccttaaaactttatacgcttattaattttagttggaatcaatacactgatgatctccctgagtacccacaccaccaggatgatttacccctaaacattgtacttccacagcccccacgtcctccttcggttgttagctattttaagttcgccggtgaagatgattgaacccgacctacaaatggatggaacaatgaccgaacagaggttgcttgctgatcgcgctaggcgtcgccaacaggatcaaaaaaataaagagttacttgatttacaaaccgttcatcagtgtaaaaaaggacttttttgcctggtaaaacaagccaccctccgctacgagaatttaccaggcaaagagcatcaactttgctacacgctgcctactcagcgacaaagcttcaccgcagtcgtgggttcggtgcctattaaagtgtcccaacaagcaggacagcaagaaggctccatttgctgcctatgtaccagccctgaatgtttgtacactttaataaaaacactgtgcggcataagaaagcttttaccaatgaattaaataaatcacttacctgaaatttaaaaatacattgtggtctccatgtactcttacaaaatttccttcttcccaactatcaaagccaatagacttgcaaacagcaaattttctccaaattttaaatggaatgtcagaattttcttcccaattcctacccaccatcttcatcttttttagatgaagcgcagcagaacccagtacgctgaagaacctgaagaaaatgacgacttcaaccccgtttacccttttgacccatatgacacagcgcatgtgccctttgttacacccccttttacttcttccaatgcttttcaagaaaaaccacccggtgtattatcacttaattacaaagatcccattgttactgaaaatggatcccttaccctaaagttagggaacggaataaagcttaattcacaaggtcaacttacaaccactaacactaaagtactagaaccccttgcccacacctcacagggtcttacactttcttggagcgccccattatcagttaaggccagtgcccttacacttaatacaatggcaccattcacaacaacaaacgaaagcttaagcttggtcactgcccctcccattacagtggaagcttcacaattgggcttagccactgtagcacctctaagcttagacggagggggaaaccttggtttggatcttctcgctcccttagttgtaaattctagcaacgcgctaaccctatctgcttcagatccgttaactgtaaattccaatagtttaggattaaatattaccagtcccattacactaataaacggatccttggctttagccacatcccctcctctggacaccacaggatctactttaaatctttctgttgctgctcctctcagtgtttcacagaacgcactcactgtttcaaccggtaacggtcttcaagtatcaggatctcaattagtaacaagaataggagatggtttacgatttgataatggggttataaaagcatatgttgccgggggaatgagactctcagggggtaaaataattttagatgttaattatccctttgatgcaaccaccaacctttcattgaggagaggatcgggcctcatatataatgagtctacaaactggaacttaacaactgatatcagcaccgaaaaaggcctaacgtttagtgggaaccaaatagctatcaacgcaggtccaggtctcacgtttaataaccgcaagcttcaggtaaaattgggcgcgggactcactttcgattcaaatgataatattgccttaaatagtattgctactccgtatgatcctttaacgttgtggacaactccggatcctccgcccaactgcactctcagacaagaacttgatgcaaaactaactttgtgtttaacaaagaacgaatctattgtgaatggcatagttagtttgataggtgttaagggggatctcttacatattcaacctaccaccaccactgtgggactgcatttagtgtttgatcgacagggacgattagtcacaacaacgcccactgccttagttccccaggcttcctggggatataaacaaggtcaatcggtatctagcagcgctgttgctaatgctttaggattcatgcctaatgtaagtgcttaccctagaccaaacgcgggtgaagccaaaagtcaaatgttaagtcagacatatttacagggagatacaactaaacctattacaatgaaagttgtatttaatggcaatgcaacagtggatggatactctctaacatttatctggacaggtgtgtcaaactatctaaaccaacagttttcaacaccatcttgttcattttcgtatattgcccaagaataaaaaaaacacaaatttgcataccgtgatcatttattaattcttttttacaatacgagtagttatactgccttcttcccatttcaccttgtatacctccctctcccactttgttgcggaaaacagctgcgcttgaatgtttctactttggttttttggtgttaacgtccacacggtttccttctgggcaaaacgacagtcggtgatacaaacaaatccttcgcccgcacagtctcttaaactgcattccattttatcctacaaaaggtaacaacagtcagtgtccatcagccgcccatgggttttctcgatgattgtaatctccaaataaaattgcttgatgatgcataataagaccctttagcagtcgctgacgatggccttcgcaccaactatgttttagtgggcgaacagtgttctcagcaattactttaacaacttttaacattaatagtctggtacgacgagcgcaacagcgcatgcgtatttcacttaagtctttgcaatagtcacagcacaacactaacatgttatttaaaattccataattaaaggtactccatccaaaactaatcttttctagcgctaaccaagcatggccatcatacataattttaacataaatcaaatggcgacctctaacaaaggtgcttcccacatacattatttcttttggcataaaatggttaacaacctcccgataccaaaaacatcttttgttaattaatgttccatatacagccattttgaaccagcgtcctaaaagcatcccagctgacatacactgtaatgaacccggacgctggcaatgacaatgtattagccaccgctcataaccatgtaacaattgagtaatttcaacatctatggtggcacaacacaaacacacactcatgtatttttttaaaataaacatctcataattagttaaaatcatatcccatggtattggccattcttgcaatacagtaaaccctacacatgaaggaatacctcttacctcacttacattatgcaaagtcagactattacactcaggccatgcagaattctctgacagagtagcttttgactgctgttcacaaggtggtagatggtacttgctgtacggcgccagtctgcaaccataccgtctgtcgcgctgcatcgtaaaccacagacttgcgagcgtcttcgtacttcgaataacaaaaccacgtacgcccactggttacagcgccgcgtcccttttgctttcgacgttggcgttccgtcacaaacgcaaaatataaccactctcgcaggcttaatagaatgtactcagcttcaggtgtgattttcaaattatgctctttaacaaagcgaatagtatccacacaggtcgcatgggccaaaccaagccatccaatacaggcagctgtatcccgacatatgggaggttgaggaatacaaggcaaaggcataaaagctaatcaagacggtcagcaagtatttgaatgcgtaaatctcgcaggtggcagcgatcacctccgctgtgctggtgaaaaatcacagccagatcaaattgtaagcggttttccaaatgttcaacaacagcatctaaaagagccacggctctaatttccacaaacaaaagtaaagcaaatgcgttatcatgaaactcttctatcatcagactgcctgactgaaccattcccaaataattttcattcttccactgttgtattatttgaacacactgattttgcaggtttaagccatgaatattaaaaagctctgtaagggcgccctccaccgccatccgcaggcagtacttcatatttgctgaaaaaagtctggatcttcaaacacctgcagtaaattcagtagatttacattaggctccacaccttgctctcgcagctgacatcttaaagccagttgtataaaatcatgcaaatcagaagccagcagcaaagaaagttcacctccaggtacaagttccggagtccccacagagcatacaacttgcacaaatgggcccatattagtaagcgtggcgccaacgtagacatcgcgcataggaggagttaaataatgcattaccaacagccaaaactcaggtagcacgtctttaagaaacgccaccacctcaaaatttaagccatgcaaatagttcaataaagactccggaaacatcacggagtaatgaacaagcggcctctgaaacatgctttaggttagcctgaaaaataaaaatatgttaaagtaaagttgcctggcgaataggtggaaaaataactctatttaaaaccaagcgcgcaactggctgctttgcgcggacatcgcaaaacacatccgagtgattaaacaacaaaacactaagctccattcttgagcctggataaagcgtttcagcgccaacaaaaacccctctggcgttcatgccgctcaaggaaaacaaagttcccacatatccaggaggaagatcaactgctatgtttaaatatagaagcacaactccgtgtggaggtataacaaaattcgcaggagaaaataacacataagcattagaatagccttcttgttcaggtaacatagccccgggtcccttaaaatacacatatacagcctcgaaaacagccataataccttaccgaaaaaacagtacaaagccaggcacagcagacacaatctgccgcaagtgcacacttttaatactgaaaaacagtgacgtagatgaccaaagttcacctgcgcaacaaaaaaccccgaaacacccgcgaaattcacttccgtaaatgactcggcacaatataatattcccacggttcgtcacatccggcgcgcccggctcccacacgcgtcacatccggcttcggcaaacttgcaaaccacgcctacggtcaattaactattcactccgcccacttcattttaatattggctcaagtccagtgtaaggtatattattgatgatgggccagtgaattgtaatacgactcactatagggcgaattgggccctctagatgcatgctcgagcggccgccagtgtgatggatatctgcagaattcgcccttccttaattaacctgcag

SEQ ID NO: 4 - DNA, 35360 bp, Adenovirus B3
  MISC_FEATURE (1)..(35360): Complete Genome
tttaaacctatctatataatataccttatagatggaatggtgccaacatgtaaatgaggtaatttaaaaaagtgcgcgctgtgtggtgattggctgcggggttaacggctaaaaggggcggcgcgaccgtgggaaaatgacgtgacttatgtgggaggagttatgttgcaagttattacggtaaatgtgacgtaaaacgaggtgtggtttgaacacggaagtagacagttttcccacgcttactgacaggatatgaggtagttttgggcggatgcaagtgaaaattctccattttcgcgcgaaaactaaatgaggaagtgaatttctgagtcatttcgcggttatgccagggtggagtatttgccgagggccgagtagactttgaccgtttacgtggaggtttcgattaccgtgtttttcacctaaatttccgcgtacggtgtcaaagttctgtgtttttacgtaggtgtcagctgatcgctagggtatttaaacctgacgagttccgtcaagaggccactcttgagtgccagcgagaagagttttctcctccgcgccgcaagtcagttctgcgctttgaaaatgagacacctgcgcttcctgccacaggaggttatctccagtgagaccgggatcgaaatactggagtttgtggtaaataccctaatgggagacgacccggaaccgccagtgcagcctttcgatccacctacgctgcacgatctgtatgatttagagatagacgggccggaggatcccaatgaggaagctgtgaatgggttttttactgattctatgctgctagctgctgatgaaggattggacataaaccctcctcctgagacacttgttaccccaggggtggttgtggaaagcggcataggtgggaaaaaattgcctgatctgggagcagctgaaatggacttgcgttgttatgaagagggttttcctcccagtgatgatgaagatggggaaactgagcagtccatccataccgcagtaaatgagggagtaaaagctgccagcgatgtttttaagttggactgtccggagctgcctggacatggctgtaagtcttgtgaatttcacaggaataacactggaatgaaagaactattgtgctcgctttgctatatgagaatgcactgccactttatttacagtaagtgtatttaagtgaaatttaaaggaatagtgtagctatttaataactgttgaatggtagatttatgtttttttcttgcgattttttgtaggtcctgtgtctgatgatgagtcaccttctcctgattcaactacctcacctcctgaaattcaggcgcccgcacctgcaaacgtatgcaagcccattcctgtgaagcctaagcctgggaaacgccctgctgtggataagcttgaggacttgttggagggtggggatggacctttggaccttagtacccggaaactgccaaggcaatgagtgccctgcagctgtgtttatttaatgtgacgtcatgtaataaaattatgtcagctgctgagtgttttattacttcttgggtggggacttggatatataagtaggagcagatctgtgtggttagctcacagcaacctgctgccatccatggaggtttgggctatcttggaagacctcagacagactaagctactgctagaaaacgcctcggacggagtctctggcctttggagattctggttcggtggtgatctagctaggctagtgtttaggataaaacaggactacagggaagaatttgaaaagttattggacgatagtccgggactttttgaagctcttaacttgggtcatcaggctcattttaaggagaaggttttatcagttttagatttttctactcctggtagaactgctgctgctgtagcttttcttacttttatattggataaatggatccgccaaactcacttcagcaagggatacgttttggatttcatagcagcagctttgtggagaacatggaaggctcgcaggatgaggacaatcttagattactggccagtgcagcctctgggagtagcagggatactgagacacccaccgaccatgccagcggttctgcaggaggagcagcaggaggacaatccgagagccggcctggaccctccggtggaggagtagctgacctgtttcctgaactgcgacgggtgcttactaggtctacgaccagtggacagaacaggggaattaagagggagaggaatcctagtgggaataattcaagaaccgagttggctttaagtttaatgagccgcaggcgtcctgaaactgtttggtggcatgaggttcagagcgaaggcagggatgaagtttcaatattgcaggagaaatattcactagaacaacttaagacctgttggttggaacctgaggatgattgggaggtggccattaggaattatgctaagatatctctgaggcctgataaacaatatagaattactaagaagattaatattagaaatgcatgctacatatcagggaatggggcagaggttataatagatacacaagataaagcagtttttagatgttgtatgatgggtatgtggccaggggttgtcggcatggaagcagtaacacttatgaatattaggtttaaaggggatgggtataatggcattgtatttatggctaacactaagctgattctacatggttgtagcttttttgggtttaataatacgtgtgtagaagcttgggggcaagttagtgtgaggggttgtagtttttatgcatgctggattgcaacatcaggtagggtcaagagtcagttgtctgtgaagaaatgcatgtttgagagatgtaatcttggcatactgaatgaaggtgaagcaagggtccgccactgcgcagctacagaaactggctgcttcattctaataaagggaaatgccagtgtgaagcataatatgatctgtggacattcggatgagaggccttatcagatgctgacctgcgctggtggacattgcaatattcttgctaccgtgcatatcgtttcacatgcacgcaaaaaatggcctgtatttgaacataatgtgattaccaagtgcaccatgcacataggtggtcgcaggggaatgtttatgccttaccagtgtaacatgaatcatgtgaaggtaatgttggaaccagatgccttttccagagtgagcttaacaggaatctttgatatgaatattcaactatggaagatcctgagatatgatgacactaaaccaagggtgcgcgcatgcgaatgcggaggcaagcatgctagattccagccggtgtgcgtggatgtgactgaagacttgagacccgatcatttggtgcttgcctgcactggagcggagttcggttctagtggtgaagaaactgactaaagtgagtagtggggcaagatgtggatggggactttcaggttggtaaggtgggcagattgggtaaattttgttaatttctgtcttgcagctgccatgagtggaagcgcttcttttgaggggggagtatttagcccttatctgacgggcaggctcccaccatgggcaggagttcgtcagaatgtcatgggatccactgtggatgggagacccgtccagcccgccaattcctcaacgctgacctatgccactttgagttcgtcaccattggatgcagctgcagccgccgccgctactgctgccgccaacaccatccttggaatgggctattatggaagcatcgttgccaattccagttcctctaataacccttcaaccctggctgaggacaagctacttgttctcttggcgcagctcgaggccttaacccaacgcttaggcgaactgtctaagcaggtggcccagttgcgtgagcaaactgagtctgctgttgccacagcaaagtctaaataaagatctcaaatcaataaataaagaaatacttgatataaaacaaatgaatgtttatttgatttttcgcgcgcggtatgccctggaccatcggtctcgatcattgagaacgcggtggatcttttccagtaccctgtaaaggtgggattgaatgtttagatacatgggcattagtccgtctcgggggtggagatagctccattgaagagcctcttgctccggggtagtgttataaatcacccagtcatagcaaggtcggagtgcatggtgttgcacaatatcttttaggagcagactaattgcaacggggaggcccttagtgtaggtgtttacaaatctgttgagctgggacgggtgcatccggggtgaaattatatgcattttggactggatcttgaggttggcaatgttgccgcctagatcccgtctcgggttcatattgtgcaggaccaccaagacagtgtatccggtgcacttgggaaatttatcatgcagcttagagggaaaagcatgaaaaaatttggagacgcctttgtgaccccccagattctccatgcactcatccataatgatagcgatggggccgtgggcagcggcacgggcgaacacgttccgggggtctgaaacatcatagttatgctcctgagtcaggtcatcataagccattttaataaactttgggcggagggtgccagattgggggatgaaagttccctctggcccgggagcatagtttccctcacatatttgcatttcccaggctttcagttcagagggggggatcatgtccacctgcggggctataaaaaataccgtttctggagccggggtgattaactgggacgagagcaaattcctaagcagctgagacttgccgcacccagtgggaccgtaaatgaccccaattacgggttgcagatggtagtttagggaacgacagctgccgtcctcccggagcaggggggccacttcgttcatcatttcccttacatggatattttcccgcaccaagtccgttaggaggcgctctcccccaagggatagaagctcctggagcgaggagaagtttttcagcggcttcagcccgtcagccatgggcattttggaaagagtctgttgcaagagctcgagccggtcccagagctcggtgatgtgctctatggcatctcgatccagcagacctcctcgtttcgcgggttgggacggctcctggagtagggaatcagacgatgggcgtccagcgctgccagggtccgatccttccatggtcgcagcgtccgagtcagggttgtttccgtcacggtgaaggggtgcgcgcctggttgggcgcttgcgagggtgcgcttcagactcatcctgctggtcgagaaccgctgccgattggcgccctgcatgtcggccaggtagcagtttaccatgagttcgtagttgagcgcctcggccgcgtggcctttggcacggagcttacctttggaagttttatggcaggcggggcagtagatacatttgagggcatacaacttgggcgcgaggaaaatggattcgggggagtatgcatccgcaccgcaggaggcgcagacggtttcgcactccacgagccaggtcagatccggctcatcggggtcaaaaacaagttttccgccatgttttttgatgcgtttcttacctttggtttccatgagttcgtgtccccgctgggtgacaaagaggctgtccgtgtccccgtagaccgactttatgggcctgtcctcgagcggagtgcctcggtcctcttcgtagaggaacccagcccactctgatacaaaagcgcgtgtccaggccagcacaaaggaggccacgtgggaggggtagcggtcgttgtcaaccagggggtccaccttctctacggtatgtaaacacatgtccccctcctccacatccaagaatgtgattggcttgtaagtgtaggccacgtgaccaggggtccccgccgggggggtataaaagggggcgggcctctgttcgtcctcactgtcttccggatcgctgtccaggagcgccagctgttggggtaggtattccctctcgaaggcgggcatgacctctgcactcaggttgtcagtttctaggaacgaggaggatttgatattgacagtaccagcagagatgcctttcataagactctcgtccatctggtcagaaaacacaatcttcttgttgtccagcttggtggcaaatgatccatagagggcattggatagaagcttggcgatggagcgcatggtttggttcttttccttgtccgcgcgctccttggcggtgatgttaagctggacgtactcgcgcgccacacatttccattcaggaaagatggttgtcagttcatccggaactattctgattcgccatcccctattgtgcagggttatcagatccacactggtggccacctcgcctcggaggggctcattggtccagcagagtcgacctccttttcttgaacagaaaggggggagggggtctagcatgaactcatcaggggggtccgcatctatggtaaatattcccggtagcaaatctttgtcaaaatagctgatggtggcgggatcatccaaggtcatctgccattctcgaactgccagcgcgcgctcataggggttaagaggggtgccccagggcatggggtgggtgagcgcggaggcatacatgccacagatatcgtagacatagaggggctcttcgaggatgccgatgtaagtgggataacatcgcccccctctgatgcttgctcgcacatagtcatagagttcatgtgagggggcaagaagacccgggcccagattggtgcggttgggtttttccgccctgtaaacgatctggcgaaagatggcatgggaattggaagagatagtaggtctctggaatatgttaaaatgggcatgaggtaagcctacagagtcccttatgaagtgggcatatgactcttgcagcttggctaccagctcggcggtgatgagtacatccagggcacagtagtcgagagtttcctggatgatgtcataacgcggttggcttttcttttcccacagctcgcggttgagaaggtattcttcgtgatccttccagtactcttcgaggggaaacccgtctttttctgcacggtaagagcccaacatgtagaactgattgactgccttgtagggacagcatcccttctccactgggagagagtatgcttgggctgcattgcgcagcgaggtatgagtgagggcaaaagtgtccctgaccatgactttgaggaattgatacttgaagtcgatgtcatcacaggccccctgttcccagagttggaagtccacccgcttcttgtaggcggggttgggcaaagcgaaagtaacatcattgaagaggatcttgccggccctgggcatgaaatttcgggtgattttgaaaggctgaggaacctctgctcggttattgataacctgagcggccaagacgatctcatcaaagccattgatgttgtgccccactatgtacagttctaagaatcgaggggtgcccctgacatgaggcagcttcttgagttcttcaaaagtgagatctgtagggtcagtgagagcatagtgttcgagggcccattcgtgcacgtgagggttcgctttaaggaaggaggaccagaggtccactgccagtgctgtttgtaactggtcccggtactgacgaaaatgctgtccgactgccatcttttctggggtgacgcaatagaaggtttgggggtcctgccgccagcgatcccacttgagttttatggcgaggtcataggcgatgttgacgagccgctggtctccagagagtttcatgaccagcatgaaggggattagctgcttgccaaaggaccccatccaggtgtaggtttccacatcgtaggtgagaaagagcctttctgtgcgaggatgagagccaatcgggaagaactggatctcctgccaccagttggaggaatggctgttgatgtgatggaagtagaactccctgcgacgcgccgagcattcatgcttgtgcttgtacagacggccgcagtactcgcagcgattcacgggatgcaccttatgaatgagttgtacctgacttcctttgacgagaaatttcagtggaaaattgaggcctggcgcttgtacctcgcgctttactatgttgtctgcatcggcatgaccatcttctgtctcgatggtggtcatgctgacgagccctcgcgggaggcaagtccagacctcggcgcggcaggggcggagctcgaggacgagagcgcgcaggccggagctgtccagggtcctgagacgctgcggagtcaggttagtaggcagtgtcaggagattaacttgcatgatcttttggagggcgtgagggaggttcagatagtacttgatctcaacgggtccgttggtggagatgtcgatggcttgcagggttccgtgtcccttgggcgctaccaccgtgcccttgtttttcattttggacggcggtggctctgttgcttcttgcatgtttagaagcggtgtcgagggcgcgcaccgggcggcaggggcggctcgggacccggcggcatggctggcagtggtacgtcggcgccgcgcgcgggtaggttctggtactgcgccctgagaagactcgcatgcgcgacgacgcggcggttgacatcctggatctgacgcctctgggtgaaagctaccggccccgtgagcttgaacctgaaagagagttcaacagaatcaatctcggtatcgttgacggcggcttgcctaaggatttcttgcacgtcgccagagttgtcctggtaggcgatctcggccatgaactgctcgatctcttcctcttgaagatctccgcggcccgctctctcgacggtggccgcgaggtcgttggagatgcgcccaatgagttgagagaatgcattcatgcccgcctcgttccagacgcggctgtagaccacagcccccacgggatctctcgcgcgcatgaccacctgggcgaggttgagctccacgtggcgggtgaagaccgcatagttgcataggcgctggaaaaggtagttgagtgtggtggcgatgtgctcggtgacgaagaaatacatgatccatcgtctcagcggcatctcgctgacatcgcccagcgcttccaagcgctccatggcctcgtagaagtccacggcaaagttaaaaaactgggagttacgcgcggacacggtcaactcctcttccagaagacggataagttcggcgatggtggtgcgcacctcgcgctcgaaagcccctgggatttcttcctcaatctcttcttcttccactaacatctcttcctcttcaggtggggctgcaggaggagggggaacgcggcgacgccggcggcgcacgggcagacggtcgatgaatctttcaatgacctctccgcggcggcggcgcatggtctcggtgacggcacgaccgttctccctgggtctcagagtgaagacgcctccgcgcatctccctgaagtggtgactgggaggctctccgttgggcagggacaccgcgctgattatgcattttatcaattgccccgtaggtactccgcgcaaggacctgatcgtctcaagatccacgggatctgaaaacctttcgacgaaagcgtctaaccagtcgcaatcgcaaggtaggctgagcactgtttcttgcgggcgggggcggctagacgctcggtcggggttctctctttcttctccttcctcctcttgggagggtgagacgatgctgctggtgatgaaattaaaataggcagttttgagacggcggatggtggcgaggagcaccaggtctttgggtccggcttgttggatacgcaggcgatgagccattccccaagcattatcctgacatctggccagatctttatagtagtcttgcatgagtcgttccacgggcacttcttcttcgcccgctctgccatgcatgcgagtgatcccgaacccgcgcatgggctggacaagtgccaggtccgctacaaccctttcggcgaggatggcttgctgcacctgggtgagggtggcttggaagtcgtcaaagtccacgaagcggtggtaggccccggtgttgattgtgtaggagcagttggccatgactgaccagttgactgtctggtgcccagggcgcacgagctcggtgtacttgaggcgcgagtatgcgcgggtgtcaaagatgtaatcgttgcaggtgcgcaccaggtactggtagccaatgagaaagtgtggcggtggctggcggtacaggggccatcgctctgtagccggggctccgggggcgaggtcttccagcatgaggcggtggtagccgtagatgtacctggacatccaggtgataccggaggcggtggtggatgcacgtgggaactcgcgcacgcggttccagatgttgcgcagcggcatgaagtagttcatggtaggcacggtctggccagtgaggcgcgcgcagtcattgacgctctgtagacacggagaaaacgaaagcgatgagcggctcgactccgtggtctgggggaacgtgaacgggttgggtcgcggtgtaccccggttcgagtccaaagctaagcgatcacgctcggatcggccggagccgcggctaacgtggtattggctatcccgtctcgacccagccgacgaatatccagggtacggagtagagtcgtttttgctgctttttcctggacgtgtgccattgccacgtcaagctttagaacgctcagttctcgggccgtgagtggctcgcgcccgtagtctggagaatcagtcgccagggttgcgttgcggtatgccccggttggagcctaagcgcggctcgtatcggccggtttccgcgacaagcgagggtttggcagccccgttatttccaagaccccgccagccgacttctccagtttacgggagcgagccctttttttttttttttttttgtttttgtcgcccagatgcatccagtgctgcgacagatgcgcccccagcaacaggccccttctcagcaacagccacaaaaggctcttcttgctcctgcaactactgcagctgcagccgtgagcggcgcgggacagcccgcctatgatctggacttggaagagggcgagggattggcgcgcctgggggctccatcgcccgagcggcacccgcgggtgcaactaaaaaaggactctcgcgaggcgtacgtgccccagcagaacctgttcagggacaggagcggcgaggagccagaggagatgcgagcatctcgatttaacgcgggtcgcgagctgcgccacggtctggatcgaagacgggtgctgcaagacgaggattttgaggtcgatgaagtcacagggatcagcccagctagggcacatgtggccgcggccaacctagtctcggcctacgagcagaccgtgaaggaggagcgcaacttccaaaaatcttttaacaaccatgtgcgcaccctgatcgcccgcgaggaagtgaccctgggtctgatgcatctgtgggacctgatggaggctatcgcccaaaaccccactagcaaaccactgacagctcagctgtttctggtggttcaacatagcagggacaacgaggcattcagggaggcgttgttgaacatcaccgagcctgatgggagatggctgtatgatctgatcaacatcctgcaaagtattatagtgcaggaacgtagcctgggtttggctgagaaagtggcagctatcaactactcggtcttgagcctgggcaaatactacgctcgcaagatctacaagaccccctacgtacccatagacaaggaggtgaagatagatgggttttacatgcgcatgactctgaaggtgctgactctgagcgacgatctgggggtgtatcgcaatgacaggatgcaccgcgcggtgagcgccagcaggaggcgcgagctgagcgacagagaacttatgcacagcttgcaaagagctctaacgggggccgggactgatggggagaactactttgacatgggagcggatttgcaatggcaacccagtcgcagggccatggaggctgcagggtgtgagcttccttacatagaagaggtggatgaagtcgaggacgaggagggcgagtacttggaagactgatggcgcgacccgtatttttgctagatggaacagcagcaggcaccggaccccgcaatgcgggcggcgctgcagagccagccgtccggcattaactcctcggacgattggacccaggccatgcaacgcataatggcgctgacgacccgcaaccccgaagcctttagacagcaaccccaggccaaccgcctttctgccatactggaggccgtagtgccctcccgctccaaccccacccacgagaaggtcctggctatcgtgaacgcgctggtggagaacaaggccatccgtcccgatgaggccgggctggtatacaatgctctcttggagcgcgtggcccgttacaacagcagcaacgtgcaaaccaacctggaccggatggtgaccgatgtgcgcgaggccgtgtctcagcgcgagcgattccagcgcgacgccaacttggggtcgttggtagcgctaaacgctttcctcagcacccagcccgccaacgtgccccgtggtcagcaagactatacaaactttttgagtgcattgagactcatggtagctgaggtgccccagagcgaggtgtaccagtccgggccagattacttcttccagaccagcagacagggcttgcagacagtgaacctgactcaggctttcaagaacctgaagggtctgtggggagtgcacgccccagtaggggatcgcgcgaccgtgtctagcttgctgactcccaactcccgcctgctgctgctgctggtatccccctttactgacagcggtagcattgaccgcaactcgtacttgggctacctgcttaacctgtatcgcgaggccataggacagagccaggtggacgagcagacctatcaagaaatcacccaagtgagccgcgccctgggtcaggaagacacgggcagtttggaagccaccctgaacttcttgctaaccaaccggtcacagaagatccctcctcagtatgcgcttaccgctgaggaggagcggatcctcagatacgtgcaacagagcgttggactgttcctgatgcaggagggggcgacacctaccgccgcgctggacatgacagctcgaaacatggagcccagcatgtatgctagtaacaggcctttcattaacaaactgctggactacctgcacagggcggccgccatgaactctgattatttcaccaatgctatcctgaacccacactggctgcccccacctggtttctacactggcgagtacgacatgcccgaccccaatgacgggttcctgtgggacgatgtggacagcagcatattttccccgcctcccggttatacagtttggaagaaggaagggggcgatagaagacactcttccgtgtcgctatccggaacggctggtgctgccgcgaccgtgcccgaagctgcaagtcctttccctagcttgcccttttcactaaacagcgttcgcagcagtgaactggggagaataacccgcccgcgcttgatgggcgaggatgagtacttgaatgactctttgctgaggccagagagggaaaagaacttccccaacaatggaatagagagtctggtggataagatgagtagatggaagacctatgcgcaggatcacagagacgagcccaggatcttgggggctacaagcagaccgatccgtagacgccagcgccacgacaggcagatgggtcttgtgtgggacgatgaggactctgccgatgatagcagcgtgttggacttgggtggaagaggagggggcaacccgttcgctcatctgcgtcccagattcgggcgcatgttgtaaaagtgaaagtaaaataaaaaggcaactcaccaaggccatggcgaccgagcgtgcgttcgttcttttttgttatctgtgtctagtacgatgaggagacgagccgtgctaggcggagcggtggtgtatccggagggtcctcctccttcttacgagagcgtgatgcagcaacaggcggcgatgatacagcccccactggaggctcccttcgtacccccacggtacctggcgcctacggaagggagaaacagcattcgttactcggagctgtcgcccctgtacgataccaccaagttgtatctggtggacaacaagtcggcggacatcgcctccctgaactatcagaacgaccacagcaacttcctgaccacggtggtgcagaacaatgactttacccccacggaggctagcacccagaccatcaactttgacgagcggtcgcgatggggcggtcagctgaagaccatcatgcacaccaacatgcccaacgtgaacgagtacatgttcagcaacaagttcaaggcgagggtgatggtgtccagaaaagctcctgaaggtgttacagtaaatgacacctatgatcataaagaggatatcttgaagtatgagtggtttgagttcattttaccagaaggcaacttttcagccaccatgacgatcgacctgatgaacaatgccatcattgacaactacctggaaattggcagacagaatggagtgctggaaagtgacattggtgttaagtttgacactagaaatttcaggctcgggtgggaccccgaaactaagttgattatgccaggtgtctacacttatgaggcattccatcctgacattgtattgctgcctggttgcggggtagactttactgaaagccgacttagcaacttgcttggcatcaggaagagacatccattccaggagggtttcaaaatcatgtatgaagatcttgaagggggtaatattcctgcccttttggatgtcactgcctatgaggaaagcaaaaaggataccactactgaaacaaccacactggctgttgcagaggaaactagtgaagatgatgatataactagaggagatacctatataactgaaaaacaaaaacgtgaagctgcagctgctgaagttaaaaaagagttaaagatccaacctctagaaaaagacagcaagagtagaagctacaatgtcttggaagacaaaatcaacacagcctaccgcagttggtacctgtcctacaattacggtaaccctgagaaaggaataaggtcttggacactgctcaccacttcagatgtcacctgtggggcagagcaggtctactggtcgctccctgacatgatgcaagacccagtcaccttccgctccacaagacaagtcaacaactacccagtggtgggtgcagagcttatgcccgtcttctcaaagagtttctacaatgagcaagccgtgtactctcagcagctccgacaggccacttcgctcacgcacgtcttcaaccgcttccctgagaaccagatcctcatccgcccgccggcgcccacaattaccaccgtcagtgaaaacgttcctgctctcacagatcacgggaccctgccgttacgcagcagtatccggggagtccagcgcgtgaccgttactgacgccagacgccgcacctgtccctacgtttacaaggccctgggcatagtcgcgccgcgcgttctttcaagccgcactttctaaaaaaaaaaaaaatgtccattctcatctcgcccagtaataataccggttggggactgtatgcgcccaccaagatgtatggaggcgcccgcaagcgctctacccagcatcctgtgcgcgttcgcggtcatttccgcgctccctggggcgcactcaagggtcgtacccgcactcggaccacggtcgatgatgtgatcgaccaggtggtcgccgatgctcgtaattatactcctactgcgcctacatctactgtggatgcagttattgacagtgtggtggcagacgcccgcgcctatgctcgccggaagagccgaaggaggcgcatcgccaggcgccacagggctactcccgccatgcgagccgcaaaagctattctgcggagggccaaacgtgtggggcgaagagccatgcttagagcggccagacgcgcggcttcaggtgccagcagcggcaggtcccgcaggcgcgcggccacggcggcagcagcggccattgccaacatggcccaaccgcgaagaggcaatgtgtactgggtgcgtgatgccactaccggccagcgcgtgcccgtgcgcacccgcccccctcgcacttagaagatactgagcagtctccgatgttgtgtcccagcggcaagtatgtccaagcgcaaatacaaggaagagatgctccaggtcatcgcgcctgaaatctacggtccgccggtgaaggatgaaaaaaagccccgcaaaatcaagcgggtcaaaaataacaaaaaggaagaagatgacgatgatgggctggtggagtttgtgcgcgagttcgccccaagacggcgcgtgcagtggcgcgggcgcaaagtgcgtcaagtgctcagacccgggaccactgtggtttttacacctggcgagcgttccagcactacttttaaacggtcctatgatgaggtgtacggggatgacgatattcttgagcaggcggcagaccgccttgacgagtttgcttatggcaagcgcactagatccagtcccaaagaggaggctgtgtccattcctttggatcatggaaatcccacccccagcctcaaaccagtcaccctgcagcaagtgctgcccgtgcctgcgcggagaggcgtaaagcgcgagggtgaggacctatatcccaccatgcagctaatggtgcccaagcgccagaggctagaagacgtactggagaaaatgaaagtggatgccgatatccagcctgaggtcaaagtaagacctatcaaggaagtggcgccaggtttgggagtacaaaccttcgacatcaagattcccaccgagtccatggaagtgcagaccgaacctgcaaaacccaccacctcaattgaggtgcaaacggaaccctggatgcccgcgcccgttgccgcccccagcaccactcgaagatcacgacgaaagtacggcccagcaagtctgctaatgcccaactatgctctgcacccatccatcattcccactccgggttacagaggcactcgctactatcgaaaccggagcaacacctctcgccgccgcaaaccacctgcaagtcgcactcgccgtcgccgccgccgcaacactgccagcaaattgactcccgccgccctggtgcggagagtgtaccgcgatggtcgcgctgaacctctgacgctgccgcgcgcgcgctaccatccaagcatcaccacttaatgactgttgacgctgcctccttgcagatatggccctcacttgccgccttcgcgtccccattactggctaccgaggaagaaactcgcgccgtagaaggatgttggggcgagggatgcgccgccacagacgaaggcgcgctatcagcagacgattagggggtggctttttgccagctcttatacccatcatcgccgcagcgatcggggcgataccaggcatagcttcagtggcggttcaggcctcgcagcgccactaacattggaaaaaacttataaataaaaaatagaatggactctgacgctcctggtcctgtgactatgtttttgtagagatggaagacatcaatttttcatccctggctccgcgacacggcacgaggccgtacatgggcacctggagcgacatcggcacgagccaactgaacgggggcgccttcaattggagcagtatctggagcgggcttaaaaattttggctcgaccgtaaaaacctatgggaacaaagcttggaacagcagcacagggcaggctctgagaaataagcttaaggaacaaaacttccaacagaaggtggtcgatgggatcgcctctggtattaacggcgtagtggatctggccaaccaggctgtacaaaaacagataaacagccgcctggacccgccgcccgcaacccctggtgaaatggaagtggaggaagaacttcctccgctggaaaagcggggcgacaagcgtccgcgacccgagctagagcagacgctggtgacgcgcgcagacgagcccccttcatatgaggaggcagtaaagctcggaatgcccactaccaggcctgtagctcacatggctaccggggtgatgaaaccttctcagtcacatcgacccgccaccttggacttgcctcctccccctgcttctgcggcgcctgttcccaaacctgtcgctaccagaaagcccaccgccgtacagcccgtcgccgtagccagaccgcgtcctgggggcacaccgcgcccgaaagcaaactggcaaagtactctgaacagcatcgtgggtctgggcgtgcagagtgtaaagcgccgtcgctgctattaattaaatatggagtagcgcttaacttgcttgtctgtgtgtatgtatcatcaccacgccgccgcagcagaggagaaaggaagaggtcgcgcgccgaggctgagttgctttcaagatggccaccccatcgatgatgccccaatgggcatacatgcacatcgccggacaggatgcttcggagtacctcagtccgggtctggtgcagttcgcccgtgcaacagacacctacttcagtatggggaacaaatttagaaaccccacagtggcgcccacccacgatgtgaccaccgaccgtagccagcgcctgatgctgcgcttcgtgcccgttgaccgggaagacaatacctactcttacaaagttcgctacacgctggctgtaggcgacaacagagtgcttgacatggccagcacattctttgacattcggggggtgcttgatagaggtcctagcttcaagccatattccggcacagcttacaattcactcgctcctaagggcgcgcccaatacatctcagtggatagttacaacaaatggggacaatgcagtaactaccaccacaaacacatttggcattgcttccatgaagggagacaatattactaaagaaggtttgcaaattgggaaagacattaccactactgaaggagaagaaaagcccatttatgccgataaaacatatcagccagagcctcaagttggagaagaatcatggactgatactgatggaacaaatgaaaagtttggtggaagagcccttaaaccagctaccaacatgaagccatgctacgggtcttttgcaagacctacaaacataaaagggggccaagctaaaaacagaaaagtaaaaccaacaaccgaaggaggggttgaaactgaggaaccagatattgatatggaatttttcgatggtagagatgctgttgcaggagctttagcgcctgaaattgtgctttatacggaaaatgtaaatttggaaactccagacagtcatgtggtatataaaccagaaacgtctaataactctcatgcaaatttgggtcaacaagccatgcctaacagacccaattacattggcttcagggataacttcgtaggcctaatgtactacaacagtactggaaatatgggagttttggctggccaagcatcacaactgaatgcagtggttgacttgcaggacagaaatactgaactgtcatatcagcttttgcttgattctctgggagacagaaccagatacttcagcatgtggaatcaggctgtggacagttacgatcccgatgttcgcattattgaaaatcatggcatcgaggatgaactgcctaattactgttttcctctgaatggcataggaccagggcacacatatcaaggcattaaagttaaaaccgatgacactaatggatgggaaaaagatgctaatgttgctccagctaatgaaataaccataggcaacaacctggctatggaaattaatatccaagctaacctttggagaagttttctgtactctaatgtggctttgtaccttccagatgtttacaagtacacgccacctaacattactttgcccactaacaccaacacctatgagtacatgaacgggcgagtggtatccccatccctggttgattcatacatcaacattggcgccaggtggtctcttgacccaatggacaatgtgaatccattcaaccaccaccgcaatgctggtctgcgctacaggtccatgcttctgggaaatggtcgttatgtgcctttccacatacaagtgcctcagaaattctttgctgtcaagaacctacttcttctacctggctcctacacctacgagtggaacttccgaaaggatgtgaacatggtcctgcaaagttcccttggaaatgacctcagaacggatggtgctaccataagtttcaccagcatcaatctctatgccaccttcttccccatggctcacaacacagcttccacccttgaagccatgctgcgcaacgataccaatgatcagtcatttaacgactacctctctgcagctaacatgctttaccccattcctgccaatgcaaccaacattccaatttccatcccatctcgcaactgggcagccttcaggggctggtccttcaccagactcaaaaccaaggagactccatctcttggatcagggttcgatccctacttcgtatattctggatctattccctacctggatggcaccttttaccttaaccacactttcaagaaggtctccatcatgtttgactcctcagtcagctggcctggcaatgacaggctgttgagtccaaatgagtttgaaatcaagcgcactgtggacggggaaggatacaacgtggcacaatgcaacatgaccaaagactggttcctggttcagatgcttgccaattacaacattggctaccagggcttttacatccctgagggatacaaggatcgcatgtactcctttttcagaaacttccagcctatgagcaggcaggtggttgatgaggttaattacactgactacaaagccgtcaccttaccataccaacacaacaactctggctttgtagggtaccttgcacctactatgagacaaggggaaccttacccagccaattatccatacccgctcatcggaactactgccgttaagagtgtcacccagaaaaagttcctgtgcgacaggaccatgtggcgcattcccttctccagcaacttcatgtccatgggggcccttaccgacctgggacagaacatgctctatgccaactcagcccatgcgctggacatgacttttgaggtggatcccatggatgagcccaccctgctttatcttcttttcgaagtcttcgacgtggtcagagtgcaccagccacaccgcggcgtcatcgaggccgtctacctgcgcacaccgttctcggccggcaacgccaccacataagaagcctcttgcttcttgcaagcagcagctgcagccatgacatgcgggtccggaaacggctccagcgagcaagagctcaaagccatcgtccgagacctgggctgcggaccctatttcctgggaacctttgacaagcgtttcccggggttcatggcccccgacaagctcgcctgcgccatagtcaacactgccggacgcgagacggggggagagcactggctggcttttggttggaacccgcgctacaacacctgctacctttttgatccttttgggttctcggatgagcggctcaaacagatttaccagtttgagtacgaggggctcctgcgtcgcagtgcccttgctaccaaagaccgctgcatcaccctggagaagtctacccaaagcgtgcagggtccgcgctcagccgcctgtggacttttttgctgtatgttccttcatgcctttgtgcactggcccgaccgccccatggacggaaaccccaccatgaagttgctgactggggtgtccaacagcatgctccaatcaccccaagtccagcccaccctgcgccgcaaccaggaggtgctataccgcttcctaaacacccactcatcttactttcgttctcaccgcgcgcgcattgaaagggccaccgcgtttgaccgtatggatatgcaataagtcatgtaaaaccgtgttcaataaacagcactttatttttacatgcactgaggctctggttttgctcatttgtttcatcatttactcagaagtcgaatgggttctggcgggagtcagagtgacccgcgggcagggatacgttgcggaactgtaacctgttctgccacttgaactcggggattaccagcttgggaactggaatctcgggaaaggtgtcttgccacaactttctggtcagttgcatagcgccaagcaggtcaggagcagagatcttgaaatcacagttggggccggcattctggacacgggagttgcgatacactgggttgcaacactggaacactatcaacgctgggtgtcttacgcttgccaacacggttgggtcactgatggtagtcacatccaagtcttcagcattggccatcccaaagggggtcatcttacatgtctgcctgcccatcacgggagcgcagcctggcttgtggttgcaatcacaatgaatggggatcagcatcatcctggcttggtcgggagttatccctgggtacacagccttcatgaaggcttcgtactgcttaaaagcttcctgggccttacttccctcggtgtagaacatcccacaggacttgctggaaaattgattagtagtacagttggcatcattcacacaacagcgggcatcgttgttggccaactgaaccacatttctgccccagcggttttgggtgatcttggctctgtctggattctccttcatagcgcgctgcccgttctcgctcgccacatccatctcgataatgtggtccttctggatcatgatagtgccatgcaggcatttcaccttgccttcataatcggtgcatccatgagcccacagagcgcacccggtgcactcccaattattgtgggcgatctcagaataataatgtaccaatccctgcatgaatcttcccatcattgttgtcaaggtcttcatgctggtaaatgtcagcgggatgccacggtgctcctcgttcacatactggtggcagatacgcttgtattgctcgtgctgctctggcatcagcttgaaagaggttctcagatcattatccagcctgtacctttccattagcacagccatcacttccatgcccttctcccaggcagataccaggggcagactcaaaggattcctaacagcaataaaagtagctcctttagctatagggtcattcttgtcgatcttctcaacacttctcttgccatccttctcaatgatgcgcaccggggggtagctgaagcccacggccaccaactgagcctgttctctttcttcttcactatcctggctgatgtcttgcagagggacatgcttggtcttcctgggcttcttcttgggagggatcgggggaggactgttgctccgctccggagacagggatgactgcgaagtttcgcttaccaataccacctggctctcggtagaagaaccggaccccacacgacggtaggtgttcctcttcgggggcagaggtggaggcgactgagatgggctgcggtctggccttggaggcggatggctggcagagctcattccgcgttcgggggtgtgctcccggtggcggtcgcttgactgatttcctccgcggctggccattgtgttctcctaggcagagaaacaacagacatggaaactcagccatcactgccaacatcgctgcaagcaccatcacacctcgcccccagcagcgacgaggaggagagcttaaccaccccaccacccagtcccgctaccaccacctctaccctcgatgatgaggaggaggtcgacgcagcccaggagatgcaggcgcaggataatgtgaaaacggaagagattgaggcagatgtcgagcaggacccgggctatgtgacgccggcggagcaccaggaggagctgaaacgctttctagacagagaggatgacgaccgcccagagcatcaagcagatggcgtttaccaggaggctgggatcagggatcatgtcgccgactacctcaccggccttggtggggaggacgtgctcctcaaacatctagcaaggcagtcgatcatagttaaagacgcattgctcgatctcactgaagtgcccatcagtgtggaagagcttagccgcgcctacgagctgaacctcttttcgcctcaggtaccccccaagcggcagccaaacggcacctgcgaggccaaccctcgactcaacttctatccagcttttactatccccgaagtgttggccacctaccacatctttttcaagaaccaaaagattccagtctcctgccgcgccaaccgcacccgcgccgatgccctgctcaacttgggtccgggagctcgcttacctgatatagcttccttggaagaggttccaaagatctttgagggtctgggaagtgatgagacacgggccgcaaatgctctgcaacagggagagaatgacatggatgaacaccacagcgctctggtggaactggagggtgacaatgcccggattgcagtgctcaagcgcagtatcgtggtcacccattttgcctaccccgctgttaacctgccccccaaagttatgagcgctgtcatggaccatctgctcatcaaacgagcaagacctctttcagaaaaccagaacatgcaggatccagacgcctcggacgagggcaagccggtagtcagtgacgagcagctatctcgctggctgggtaccaactccccccgagatttggaagagaggcgcaagcttatgatggctgtagtgctagtaactgtggagctggagtgtctgcgccgctttttcaccgaccctgagaccctgcgcaagctagaggagaacctgcactacacctttagacatggcttcgtgcggcaggcatgcaagatctccaacgtggagcttaccaacctggtttcttacatgggcattttgcatgagaaccgactagggcagagcgtcctgcacaccacccttaaaggggaggcccgccgtgactacatccgagactgtgtctacctctacctctgccatacctggcaaactggtatgggtgtgtggcaacagtgtttggaagagcagaacctaaaagagctggacaagctcttgcagagatccctcaaagccctgtggacaggttttgatgagcgcaccgtcgcctcggacctggcagacatcatcttccccgagcgtctcagggttactctgcgaaacggcctgccagactttatgagccagagcatgcttaacaactttcgctctttcatcctggaacgctccggtatcctgcctgccacctgctgtgcgctgccctccgactttgtgcctctcacctaccgcgagtgcccaccgccgctatggagccactgctacctgttccgcctggccaactacctctcctaccactcggatgttatagaggatgtgagcggagacggcctgctggaatgccactgccgctgcaatctttgcacaccccaccgctcccttgcctgcaacccccagttgctgagcgagacccagattatcggcaccttcgagctgcagggtcccagaagtaaaggcgaggggtcttctccggggcagagtttgaaactgacaccggggctgtggacctccgcctacctgcgcaagtttcaccccgaggactaccatccctatgagatcaggttctatgaggaccaatcacatcctcccaaagtcgagctctcagcctgcgtcatcacccagggagcaattctggcccaattgcaagccatccaaaaatctcgccaagaatttctgctaaaaaagggaaacggggtctaccttgaccctcagaccggtgaggagctcaacacaaggttcccccaggatgtcccatcgccgaggaagcaagaagttgaaggtgcagctgtcgcccccagaggatatgaaggaagactgggacagtcaggcagaggaggagatggaagattgggacagccaggcagaggaggtggacagcctggaggaagacagtttggaggaggaagacgaggaggcagaggaggtggaagaagcaaccgccgccaaacagttgtcatcggcggcggagacaagcaagtccccagacagcagcacggctaccatctccgctccgggtcggggggcccagcggcggcccaacagtagatgggacgagaccgggcgattcccaaacccgaccaccgcttccaagaccggtaagaaggagcgacagggatacaagtcctggcgtggacataaaaacgctatcatctcctgcttgcatgaatgcgggggcaacatatccttcacccggcgatacctgctcttccaccacggtgtaaacttcccccgcaatatcttgcattactaccgtcacctccacagcccctactgcagtcagcaagtcccggcaaccccgacagaaaaatacagcagcgacaacggtgaccagaaaaccagcagttagaaaatccacaacaagtgcaccaggaggaggactgaggatcacagcgaacgagccagcgcagaccagagagctgaggaaccggatctttccaaccctctatgccattttccagcagagtcgggggcaagagcaggaactgaaagtaaaaaaccgatctctgcgctcgctcaccagaagttgtttgtatcacaagagcgaagaccaacttcagcgcactctcgaggacgccgaggctctcttcaacaagtactgcgcgctgactcttaaagagtagcccttgcccgcgctcattttgaaaacggcgggaatcacgtcacccttggcacctgtcctttgcccttgtcatgagtaaagagattcccacgccttacatgtggagctatcagccccaaatggggttggcagcaggcgcttcccaggactactccacccgcatgaattggcttagcgccgggccctcaatgatatcacgggttaatgatatacgagcttatcgaaaccagttactcctagaacagtcagctctcaccaccacaccccgtcaacaccttaatccccgaaattggcccgccaccctggtgtaccaggaaaatcccgctcccaccaccgtactacttcctcgagacgcccaggccgaagttcagatgactaacgcaggtgtacagctggcgggcggttccgccctatgtcgtcaccgacctcaacagagtataaaacgcctggtgattagaggccgaggtatccagctcaacgacgagtcggttagctcttcgcttggtctgcgaccagacggagtcttccaaatcgccggctgtgggagatcttccttcactcctcgtcaggctgtgctgactttggagagttcgtcctcgcagccccgctcgggcggcattggaactctccagtttgtggaggagtttactccctctgtctacttcaaccccttctccggctctcctggccagtacccggacgagttcataccaaacttcgacgcaatcagcgagtcagtggatggctatgattgatgtctaatggtggtgcggctgagctagctcgactgcgacacctagaccactgccgccgctttcgctgcttcgcccgggaactcaccgagttcatctacttcgaactctccgaggagcaccctcagggtccggcccacggagtgcggattaccatcgaagggggaatagactctcgcctgcatcgcatcttctcccagcggcccgtgctaattgaacgcgaccagggaaatacaaccatctccatctactgcatctgtaaccaccccggattgcatgaaagcctttgctgtcttgtttgtgctgagtttaataaaaactgagttaagaccctcctacggactaccgcttcttcaatcaggactttacaacaccaaccagatcttccagaagacccagacccttcctcctttcatccaggactctaactctaccttaccagcaccctccactactaaccttcccgaaacaaacaagcttgcatctcatctgcaacaccgcctttcacgaagccttctttctgccaatactaccactcccaaaaccggaggtgagctccgcggtcttcctactgacgacccctgggtggtagcgggttttgtaacgttaggagtagttgcgggtgggcttgtgctgatcctttgctacctatacacaccttgctgtgcatatttagtcatattgtgctgttggtttaagaaatgggggccatactagtcgtgcttgctttactttcgcttttgggtctgggctctgctaatctcaatcctctcgatcacgatccatgtttagacttcgacccagaaaactgcacacttacttttgcacccgacacaagccgtctctgtggagttcttattaagtgcggatgggactgcaggtccgttgaaattacacataataacaaaacatggaacaataccttatccaccacatgggagccaggagttccccagtggtatactgtctctgtccgaggtcctgacggttccatccgcattagtaacaacactttcattttttctgaaatgtgcgatctggccatgttcatgagcagacagtatgacctatggcctcccagcaaagagaacattgtggcattttccattgcttattgcttggtaacatgcatcatcactgctatcatttgtgtgtgcatacacttgcttatagttattcgccctagacaaagcaatgaggaaaaagagaaaatgccttaacctttttcctcataccttttctttacagcatggcttctgttacagctctaattattgccagcattgtcactgtcgctcacgggcaaacaattgtccatattaccttaggacataatcacactcttgtagggcccccaattacttcagaggttatttggaccaaacttggaagtgttgattattttgatataatttgcaacaaaactaaaccaatatttgtaatctgtaacagacaaaatctcacgttaattaatgttagcaaaatttataacggttactattatggttatgacagatccagtagtcaatataaaaattacttagttcgcataactcagcccaaattaacagtgccaactatgacaataattaaaatggctaataaagcattagaaaattttacatcaccaacaacacccaatgaaaaaaacattccaaattcaatgattgcaattattgcggcggtggcattgggaatggcactaataataatatgcatgctcctatatgcttgttactataaaaagtttcaacataaacaggatccactactaaattttaacatttaattttttatacagatgatttccactacaatttttatcattactagccttgcagctgtaacttatggccgttcacacctaactgtacctgttggctcaacatgtacactacaaggaccccaagaaggctatgtcacttggtggagaatatatgataatggagggttcgctagaccatgtgatcagcctggtacaaaattttcatgcaacggaagagacttgaccattattaacataacatcaaatgagcaaggcttctattatggaaccaactataaaaatagtttagattacaacattattgtagtgccagccaccacttctgctccccgcaaatccactttctctagcagcagtgccaaagcaagcacaattcctaaaacagcttctgctatgttaaagcttccaaaaatcgctttaagtaattccacagccgctcccaatacaattcctaaatcaacaattggcatcattactgccgtggtagtgggattaatgattatatttttgtgtataatgtactacgcctgctgctatagaaaacatgaacaaaaaggtgatgcattactaaattttgatatttaattttttatagaattatgatattgtttcaatcaaataccactacctcctatgcatacacaaacattcagcctaaatacgctatgcaactagaaatcacaatactaattgtaattggaattcttatactatctgttattctttattttatattctgccgtcaaatacccaatgttcatagaaattctaaaagacgtcccatctattctcctatgattagtcgtccccatatggctctgaatgaaatctaagatctttttttttttctcttacagtatggtgaacatcaatcatgatccctagaaatttcttcttcaccatactcatctgtgcttttaatgtctgtgctactttcacagcagtagccactgcaagcccagactgtataggaccatttgcttcctatgcactttttgccttcgttacttgcatctgcgtgtgtagcatagtctgcctggttattaattttttccaactggtagactggatctttgtgcgaattgcctacctacgtcaccatcccgaataccgcaatcaaaatgttgcggcacttcttaggcttatttaaaaccatgcaggctatgctaccagtcattttaattttgctactaccctgcattcccctagcttccaccgccactcgcgctacacctgaacaacttagaaaatgcaaatttcaacaaccatggtcatttcttgattgctaccatgaaaaatctgattttcccacatactggatagtgattgttggaataattaacatactttcatgtacctttttctcaatcacaatataccccacatttaattttgggtggaattctcccaatgcactgggttacccacaagaaccagatgaacatattccactacaacacatacaacaaccactagcactggtacagtatgaaaatgagccacaaccttcactgccccctgccattagttacttcaacctaaccggcggagatgactgacccaatcgccacatcatccaccgctgccaaggagctgctggacatggacggacgtgcctcagaacagcgactcatccaactacgcattcgtcagcagcaggaacgagcagtaaaagagctaagggatgccattgggattcaccagtgcaaaaaaggcatattctgcttagtaaaacaatccaaaatctcctacgagatcaccgctactgaccatcgtctctcatacgagctcggtccgcagcgacaaaaattcacctgcatggtgggaatcaaccccatagttatcacccagcagtctggagatactaagggttgtatccagtgttcctgtgattccaccgagtgcatctacacactgctgaagaccctctgcggccttcgagacctcctacccatgaactaatcattgcccctaccttacccaatcaaaatattaataaagacacttacttgaaatcagcaatacagtctttgtcaaaactttctaccagcagcacctcaccctcttcccaactctggtactctaaacgtcggagggtggcatactttctccacactttgaaagggatgtcaaattttatttcctcttctttgcccacaatcttcatttctttatccccagatggccaagcgagctcggctaagcacttccttcaacccggtgtacccttatgaagatgaaagcagctcacaacacccatttataaatcctggtttcatttcccctgacgggttcacacaaagtccaaacggggttttaagtcttaaatgtgttaatccacttaccactgcaagcggctccctccaacttaaagtgggaagtggtcttacagtagacactactgatggatccttagaagaaaacatcaaagttaacacccccctaacaaagtcaaaccattctataaatttaccaataggaaacggtttgcaaatagaacaaaacaaactttgcagtaaactcggaaatggtcttacatttgactcttccaattctattgcactgaaaaataacactttatggacaggtccaaaaccagaagccaactgcataattgaatacgggaaacaaaacccagatagcaaactaactttaatccttgtaaaaaatggaggaattgttaatggatatgtaacgctaatgggagcctcagactacgttaacaccttatttaaaaacaaaaatgtctccattaatgtagaactatactttgatgccactggtcatatattaccagactcatcttctcttaaaacagatctagaactaaaatacaagcaaaccgctgactttagtgcaagaggttttatgccaagtactacagcgtatccatttgtccttcctaatgcgggaacacataatgaaaattatatttttggtcaatgctactacaaagcaagcgatggtgccctttttccgttggaagttactgttatgcttaataaacgcctgccagatagtcgcacatcctatgttatgacttttttatggtccttgaatgctggtctagctccagaaactactcaggcaaccctcataacctccccatttaccttttcctatattagagaagatgactgacaacaaaaataaagttcaacattttttattgaaattccttttacagtattcgagtagttattttgcctcccccttcccatttaacagaatacaccaatctctccccacgcacagctttaaacatttggataccattagagatagacatagttttagattccacattccaaacagtttcagagcgagccaatctggggtcagtaatacataaaaatgcatcgggatagtcttttaaagcgctttcacagtccaactgttgcggatgcgactccggagtctgaatcacggtcatctggaagaagaacgatgggaatcataatccgaaaacggaatcgggcgattgtgtctcatcaaacccacaagcaaccgctgtctgcgtcgctccgtgcgactgctgtttatgggatcggggtccgcagtgtcctgaagcatgattttaatagcccttaacattaactttctggtgcgatgcgcgcagcaacgcattctgatttcacttagattactacagtaggtacagcacattatcacaatattgtttaataaaccataattaaaagcgctccagccaaaactcatatctgatataatcgcccctgcatgaccatcataccaaagtttaatataaattaaatgtcgttccctcaaaaacacactacccacatacatgatctcttttggcatgtgcatattaacaatttgtctgtaccatggacaacgttggttaatcatgcaacccaatataaccttccggaaccacactgccaacaccgctcccccagccatgcattgaagtgaaccctgctgattacaatgacaatgaagaacccaattctctcgaccatgaatcacttgagactgaaaaatatctatagtagcacaacaaagacataaatgcatgcatcttctcataatttttaactcctctggatttaaaaacatatcccaaggaatgggaaactcttgcagaacagtaaagctggcagaacaaggaagaccacgaacacaacttacactatgcatagtcatagtatcacaatctggcaacagcgggtggtcttcagtcatagaagctcgggtttcattttcctcacatcgtggtaattgggctctggtgtaagggtgatgtctggcgcatgatgtggagcgtgcgcgcaaccttgtcataatggagttgcttcctgacattctcgtattttgtatagcaaaacgctgccctggcacaacacactcttcttcgtcttctatcctgccgcttagtgtgttccgtctgataattcaagtacagccacactcttaagttggtcaaaagaatgctggcttcagttgtaatcaaaactccatcatatttaattgttctaaggaaatcatccacggtagcatatgcaaatcccaaccaagcaatgcaactggattgcgtttcaagcagcagaggagagggaagagacggaagaatcatgttaatttttattccaaacgatctcgcagtacttcaaattgtagatcgcgcagatggcatctatcgcccccactgtgttggtgaaaaagcacagctaaatcaaaagaaatgcgattttcaaggtgctcaacggtggcttccaacaaagcctccacgcgcacatccaaaaacaaaagaataccaaaagaaggagcattttctaactcctcaaacatcatattacattcctgcaccattcccagataattttcagctttccagccttgaattattcgtgtcagttcttgtggtaaatccaaaccacacattacaaacaggtcccggagggcgccctccaccaccattcttaaacacaccctcataatgacaaaatatcttgctcctgtgtcacctgtagcaaattaagaatggcatcatcaattgacatgcccttggctctaagttcttctctaagttctagttgtagatactctctcatattatcaccaaactgcttagccagaagccccccgggaacaatagcaggggacgctacagtgcagtacaagcgcagacctccccaattggctccagcaaaaacaagattagaataagcatactgggaaccaccagtaatatcatcaaagttgctggaaatataatcaggcagagtttcttgtaaaaattgaataaaagaaaaattttccaaagaaacattcaaaaccgttgggatgcaaatacaataggttaccgcgctgcgctccaacattgttagttttgaattagtctgcaaaataaaagaaacaagcgtcatatcatagtagcctgtcgaacaggtggaaaaatcagtctttccatcacaagacaagccacagggtctccagctcgaccctcgtaaaacctgtcattgtgattaaacaacagcaccgaaagttcctcgcggtggccagcatgaataattcttgatgaagcatacaatccagacatgttagcatcagttaaagagaaaaaacagccaacatagcctctgggtataattatgcttaattttaagtatagcaaagccacccctcgcggatacaaagtaaaaggcacaggagaataaaaaatataattatttctctgctgctgttcaggcaacgttgctcccggtccctctaaatagacatacaaagcctcatcagccatggcttaccaggcaaagtacagcgggcgcacaaagcacaagctctaaagaagctctaaaaacactctccaacctctccacaatatatacacaagccctaaactgacgtaatgggagtaaagtgaaaaaaaaataccgccaagcccaacacacaccccgaaactgcgtcagcaggaaaaagtacagtttcacttccgcattcccaacaagcgtaacttcctctttctcatggtacgtcacatccgattaacttgcaacgtcattttcccacggtcgcgccgccccttttagccgttaaccccgcagccaatcaccacacagcgcgcacttttttaaattacctcatttacatgttggcaccattccatctataaggtatattatatagatagcctgcag

SEQ ID NO: 5 - DNA, 35564 bp, Adenovirus B7
  MISC_FEATURE (1)..(35564): Complete Genome
agaccaaaacgatctcaagcgatcgcgtttaaacaagggcgaattccagcacactggcggccgttactagtggatccgagctcggtaccaagcttgatgcatagcttgagtattctatagtgtcacctaaatagcttggccatcatcaataatataccttatagatggaatggtgccaacatgtaaatgaggtaatttaaaaaagtgcgcgctgtgtggtgattggctgtggggtgaatgactaacatgggcggggcggccgtgggaaaatgacgtgacttatgtgggaggagttatgttgcaagttattgcggtaaatgtgacgtaaaaggaggtgtggtttgaacacggaagtagacagttttcccacgcttactgataggatatgaggtagttttgggcggatgcaagtgaaaattctccattttcgcgcgaaaactgaatgaggaagtgaatttctgagtcatttcgcggttatgacagggtggagtatttgccgagggccgagtagactttgaccgtttacgtggaggtttcgattaccgtgtttttcacctaaatttccgcgtacggtgtcaaagtcctgtgtttttacgtaggtgtcagctgatcgctagggtatttaaacctgacgagttccgtcaagaggccactcttgagtgccagcgagaagagttttctcctccgcgccgcaagtcagttctgcgctttgaaaatgagacacctgcgcttcctgccacaggagattatctccagtgagaccgggatcgaaatactggagtttgtggtaaataccctaatgggagacgacccggaaccgccagtgcagccttttgatccacctacgctgcacgatctgtatgatttagaggtagacgggccggaggatcccaatgagggagctgtgaatgggttttttactgattctatgctgctagctgccgatgaaggattggacataaaccctcctcctgagacccttgtcaccccaggggtggttgtggaaagcggcagaggtgggaaaaaattgcctgatctgggagcagctgaaatggacttgcgttgttatgaagagggttttcctccgagtgatgatgaagatggggaaactgagcagtccatccataccgcagtgaatgagggagtaaaagctgccagcgatgtttttaagttggactgtccggagctgcctggacatggctgtaagtcttgtgaatttcacaggaataacactgggatgaaagaactattgtgctcgctttgctatatgagaatgcactgccactttatttacagtaagtgtatttaagtgaaatttaaaggaatagtgtagctgtttaataactgttgaatggtagatttatgtttttacttgcgattttttgtaggtcctgtgtctgatgatgagtcaccttctcctgattcaactacctcacctcctgaaattcaggcgcccgcacctgcaaacgtatgcaagcccattcctgtaaagcctaagcctgggaaacgccctgctgtggataagcttgaggacttgttggagggtggggatggacctttggaccttagtacccggaaactgccaaggcaatgagtgccctgcagctgtgtttatttaatgtgacgtcatgtaataaaattatgtcagctgctgagtgttttattacttcttgggtggggtcttggatatataagtaggagcagatctgtgtggttagctcacagcaacttgctgccatccatggaggtttgggctatcttggaagacctcagacagactaggctactactagaaaacgcctcggacggagtctctggcctttggagattctggttcggtggtgatctagctaggctagtgtttaggataaaacaggactacagggaagaatttgaaaagttattggacgacattccaggactttttgaagctcttaacttgggccatcaggctcattttaaggagaaggttttatcagttttagatttttctactcctggtagaactgctgctgctgtagcttttcttacttttatattggataaatggatccgccaaactcacttcagcaagggatacgttttggatttcatagcagcagctttgtggagaacatggaaggctcgcaggatgaggacaatcttagattactggccagtgcagcctctgggagtagcagggatactgagacacccaccgaccatgccagcggttctgcaggaggagcagcaggaggacaatccgagagccggcctggaccctccggtggaggagtagctgacctgtttcctgaactgcgacgggtgcttactaggtctacgaccagtggacagaacaggggaattaagagggagaggaatcctagtgggaataattcaagaaccgagttggctttaagtttaatgagccgcaggcgtcctgaaactgtttggtggcatgaggttcagagcgaaggcagggatgaagtttcaatattgcaggagaaatattcactagaacaacttaagacctgttggttggaacctgaggatgattgggaggtggccattaggaattatgctaagatatctctgaggcctgataaacaatatagaattactaagaagattaatattagaaatgcatgctacatatcagggaatggggcagaggttataatagatacacaagataaagcagcttttagatgttgtatgatgggtatgtggccaggggttgtcggcatggaagcaataacacttatgaatattaggtttagaggggatgggtataatggcattgtatttatggctaacactaagctgattctacatggttgtagcttttttgggtttaataatacgtgtgtagaagcttgggggcaagttagtgtgaggggttgtagtttttatgcatgctggattgcaacatcaggtagggtgaagagtcagttgtctgtgaagaaatgcatgtttgagagatgtaatcttggcatactgaatgaaggtgaagcaagggtccgccactgcgcagctacagaaactgcctgcttcattctaataaagggaaatgccagtgtgaagcataatatgatctgtggacattcggatgagaggccttatcagatgctaacctgcgctggtggacattgcaatattcttgctaccgtgcatatcgtttcacatgcacgcaagaaatggcctgtatttgaacataatgtgattaccaagtgcaccatgcatataggtggtcgcaggggaatgtttatgccttaccagtgtaacatgaatcatgtgaaggtaatgttggaaccagatgccttttccagagtgagcgtaacaggaatctttgatatgaatattcaactatggaagatcctgagatatgatgacactaaaccaagggtgcgcgcatgcgaatgcggaggcaagcatgctagattccagccggtgtgcgtggatgtgactgaagacctgaggcccgatcatttggtgcttgcctgcactggagcggagttcggttctagtggtgaagaaactgactaaagtaagtagtgggggcaaaatgtggatggggactttcaggttggtaaggtggacaaattgggtaaattttgttaatttctgtcttgcagctgccatgagtggaagcgcttcttttgaggggggagtatttagcccttatctgacgggcaggctcccaccatgggcaggagttcgtcagaatgtcatgggatccactgtggatgggagacccgtccagcccgccaattcctcaacgctgacctatgccactttgagttcgtcaccattggatgcagctgcagccgccgccgctactgctgccgccaacaccatccttggaatgggctattacggaagcattgttgccaattccagttcctctaataatccttcaaccctggctgaggacaagctacttgttctcttggctcagctcgaggccttaacccaacgcttaggcgaactgtctaagcaggtggcccagttgcgtgagcaaactgagtctgctgttgccacagcaaagtctaaataaagatctcaaatcaataaataaagaaatacttgttataaaaacaaatgaatgtttatttgatttttcgcgcgcggtatgccctggaccatcggtttcgatcattgagaactcggtggatcttttccagtaccctgtaaaggtgggattgaatgtttagatacatgggcattagtccgtctcgggggtggagatagctccattgaagagcctcttgctccggggtagtgttataaatcacccagtcatagcaaggtcggagtgcatggtgttgcacaatatcttttaggagcagactaattgcaacggggaggcccttagtgtaggtgtttacaaatctgttgagctgggacgggtgcatccggggtgaaattatatgcattttggactggatcttgaggttggcaatgttgccgcctagatcccgtctcgggttcatattgtgcaggaccaccaagacagtgtatccggtgcacttgggaaatttatcatgcagcttagagggaaaagcatgaaaaaatttggagacgcctttgtgaccccccagattctccatgcactcatccataatgatagcgatggggccgtgggcagcggcacgggcgaacacgttccgggggtctgaaacatcatagttatgctcctgagtcaggtcatcataagccattttaataaactttgggcggagggtgccagattgggggatgaaagttccctgtggcccgggagcatagtttccctcacatatttgcatttcccaggctttcagttcagagggggggatcatgtccacctgcggggctataaaaaataccgtttctggagccggggtgattaactgggatgagagcaaattcctaagcagctgagacttgccgcacccggtgggaccgtaaatgaccccaattacgggttgcagatggtagtttagggagcgacagctgccgtcctcccggagcaggggggccacttcgttcatcatttcccttacatggatattttcccgcaccaagtccgttaggaggcgctctcccccaagtgatagaagctcctggagcgaggagaagtttttcagcggcttcagcccgtcagccatgggcattttggaaagagtctgttgcaagagctcgagccggtcccagagctcggtgatgtgctctatggcatctcgatccagcagacctcctcgtttcgcgggttgggacggctcctggagtagggaatcagacgatgggcgtccagcgctgccagggtccgatccttccatggtcgcagcgtccgagtcagggttgtttccgtcacggtgaaggggtgcgcgcctggttgggcgcttgcgagggtgcgcttcagactcatcctgctggtcgagaaccgctgccgatcggcgccctgcatgtcggccaggtagcagtttaccataagttcgtagttgagcgcctcggccgcgtggcctttggcacggagcttacctttggaagttttatggcaggcagggcagtagatacatttgagggcatacagcttgggcgcgaggaaaatggattcgggggagtatgcatccgcaccgcaggagacgcagacggtttcgcactccacaagccaggtcagatccggctcatcagggtcaaaaacaagttttccgccatgttttttgatgcgtttcttacctttggtttccatgagttcgtgtccacgctgggtgacaaagaggctgtccgtgtccccgtagaccgactttatgggcctgtcctcgagcggagtgcctcggtcctcttcgtagaggaatccagcccactctgatacaaaagcgcgtgtccaggccagcacaaaggaggccacgtgggaggggtagcggtcgttgtcaaccaggggatccaccttctctacggtatgtaaacacatgtccccctcctccacatccaagaatgtgattggcttgtaagtgtaggccacgtgaccaggggtccccgccgggggggtataaaagggggcggacctctgttcgtcctcactgtcttccggatcgctgtccaggagcgccagctgttggggtaggtattccctctcgaatgcgggcatgacctctgcactcaggttgtcagtttctaggaacgaggaggatttgatattgacagtaccagcagagatgccttttataagactctcgtccatctggtcagaaaacacaatcttcttgttgtccagcttggtggcaaatgatccatagagggcattggatagaagcttggcgatggagcgcatggtttggttcttttccttgtccgcgcgctccttggcggcgatgttaagctggacgtactcgcgcgccacacatttccattcaggaaagatggttgtcagttcatccggaactattctgactcgccatcccctattgtgcagggttatcagatccacactggtggccacctcgcctcggaggggctcattggtccagcagagtcgacctccttttcttgaacagaaaggggggagggggtctagcatgaactcatcaggggggtccgcatctatggtaaatattcccggtagcaaatctttgtcaaaatagctgatggtggcaggatcatccaaggtcatctgccattctcgaactgccagcgcgcgctcataggggttaagaggggtgccccagggcatggggtgggtgagcgcggaggcatacatgccacagatatcgtagacatagaggggctcttcgaggatgccgatgtaagtgggataacagcgcccccctctgatgcttgctcgcacatagtcatagagttcatgtgagggggcgagaagacccgggcccagattggtgcggttgggtttttccgccctgtaaacgatttggcgaaagatggcatgggaattggaagaaatagtaggtctctggaatatgttaaaatgggcatgaggtaggcctacagagtctcttatgaagtgggcatatgactcttgcagcttggctaccagctctgcggtgacgagtacatccagggcacagtagttgagagtttcctggatgatgtcataacgcggttggcttttcttttcccacagctcgcggttgagaaggtattcttcgtgatccttccagtactcttcgaggggaaacccgtctttttctgcacggtaagagcccaacatgtagaactgattgactgccttgtagggacagcatcccttctccactgggagagagtatgcttgggctgcattgcgcagcgaggtatgagtgagggcaaaagtgtccctgaccatgactttgaggaattgatacttgaagtcgatgtcatcacaggccccctgttcccagagttggaagtccgcccgcttcttgtaggcgggattgggcaaagcgaaagtaacatcattgaagaggatcttgccggccctgggcatgaaatttcgggtgattttaaaaggctgagggacctctgctcggttattgataacctgagcggccaagacgatctcatcaaagccattgatgttgtgccccactatgtacagttctaagaatcgaggggtgcccctgacatgaggcagcttcttgagttcttcaaaagtgagatctgtagggtcagtgagagcatagtgttcgagggcccattcgtgcatgtgagggttcgctttgaggaaggaggaccagaggtccactgccagtgctgtttgtaactggtcccggtactgacgaaaatgctgtccgactgccatcttttctggggtgatgcaatagaaggtttgggggtcctgccgccagcgatcccacttgagtttcatggcgatgtcataggcgatgttaacgagccgctggtctccagagagtttcatgaccagcatgaaggggattagctgcttgccaaaggaccccatccaggtgtaggtttccacatcgtaggtgaggaagagcctttctgtgcgaggatgagagccaatcgggaagaactggatttcctgccaccagttggaggaatggctgttgatgtgatggaagtagaactccctgcgacgcgccgagcattcatgcttgtgcttgtacagacggccgcagtactcgcagcgattcacgggatgcacctcatgaatgagttgtacctgacttcctttgacgagaaatttcagtggaaaattgaggcctggcgcttgtacctcgcgctctactatgttgtctgcatcggcatgaccatcttctgtctcgatggtggtcatgctgacgagccctcgcgggaggcaagtccagacctcggcgcggcaggggcggagctcgaggacgagagcgcgcaggccggagctgtccagggtcctgagacgctgcggagtcaggttagtaggcagtgtcaggagattgacttgcatgatcttttcgagggcgtgagggaggttcagatggtacttgatctccacgggtccgttggtggagatgtcgatggcttgcagggttccgtgccccttgggcgctaccaccgtgcccttgtttttccttttgggcggcggtggctctgttgcttcttgcatgtttagaagcggtgtcgagggcgcgcaccgggcggcaggggcggctcgggacccggcggcatggctggcagtggtacgtcggcaccgcgcgcgggtaggttctggtactgcgccctgagaagactcgcatgcgcgacgacgcggcggttgacatcctggatctgacgcctctgggtgaaagctaccggccccgtgagcttgaacctgaaagagagttcaacagaatcaatctcggtatcgttgacggcggcttgcctaaggatttcttgcacgtcgccagagttgtcctggtaggcgatctcggccatgaactgctcgatctcttcctcttgaagatctccgcggcccgctctctcgacggtggccgcgaggtcgttggagatgcgcccaatgagttgagagaaagcattcatgcccgcctcgttccagacgcggctgtagaccacagcccccacgggatctctcgcgcgcatgaccacctgggcgaggttgagctccacgtggcgggtgaagaccgcatagttgcataggcgctggaaaaggtagttgagtgtggtggcgatgtgctcggtgacgaagaaatacatgatccatcgtctcagcggcatctcgctgacatcgcccagcgcttccaagcgctccatggcctcgtagaagtccacggcaaagttgaaaaactgggagttacgcgcggacacggtcaactcctcttccagaagacggataagttcggcgatggtggtgcgcacctcgcgctcgaaagctcctaggatttcttcctcaatctcttcttcttccactaacatctcttcctcttcaggtggggctgcaggaggagggggaacgcggcgacgccggcggcgcacgggcagacggtcgatgaatctttcaatgacctctccgcggcggcggcgcatagtctcggtgacggcacgaccgttctccctgggtctcagagtgaagacgcctccgcgcatctccctgaagtggtgactgggaggctctccgttgggcagggacaccgcgctgattatgcattttatcaattgccccgtaggtactccgcgcaaggacctgattgtctcaagatccacgggatctgaaaacctttcgacgaaagcgtctaaccagtcgcaatcgcaaggtaggctgagcactgtttcttgcgggcgggggcggctagacgctcggtcggggttctctctttcttctccttcctcctcttgcgagggtgagacgatgctgctggtgatgaaattaaaataggcagttttaagacggcggatggtggcgaggagcaccaggtctttgggtccggcttgttggatgcgcaggcgatgagccattccccaagcattatcctgacatctggccagatctttatagtagtcttgcatgagtcgttccacgggcacttcttcttcgcccgccctgccatgcatgcgagtgatcccgaacccgcgcatgggctggacaagtgccagatccgctacaaccctttcggcgaggatggcttgctgcacctgggtgagggtggcttgaaagtcgtcaaagtccacgaagcggtggtaggccccggtgttgattgtgtaggagcagttggccatgactgaccagttgactgtctggtgcccagggcgcacgagctcggtgtacttcaggcgcgagtatgcgcgcgtgtcaaagatgtaatcgttgcaggtgcgcaccaggtactggtagccgatgagaaagtgtggcgatggctggcggtacaggggccatcgctctgtagccggggctccgggggcgaggtcttccagcatgaggcggtggtagccgtagatgtacctggacatccaggtgataccggaggcggtggtggatgcacgtgggaactcgcgcacgcggttccagatgttgcgcagcggcatgaagtagttcatggtaggcacggtctggccagtgaggcgcgcgcagtcattgacgctctgtagacacggagaaaacgaaagcgatgagcggctcgactccgtggcctgggggaacgtgaacgggttgggtcgcggtgtaccccggttcgagtccaaagctaagcaatcacactcggatcggccggagccgcggctaacgtggtattggctatcccgtctcgacccagccgacgaatatccagggtacggagtagagtcgtttttgctgcttttttcctggacgtgtgccattgccacgtcaagctttacaacgctcagttctcgggccgtgagtggctcgcgcccgtagtctggagaatcagtcgccagggttgcgttgcggtatgcccccggttcgagcctaagcgcggctcgtatcggccggtttccgcgacaagcgagggtttggcagcccagtcatttccaagaccccgccagccgacttctccagtttacgggagcgagcccttttttttttttgtttttgtcgcccagatgcatccagtgctgcgacagatgcgcccccagcaacaggccccttctcagcaacagccacaaaaggctcttcttgctcctgcaactactgcagctgcagccgtgagcggcgcgggacagcccgcctatgatctggacttggaagagggcgagggattggcgcgcctgggggctccatcgcccgagcggcacccgcgggtgcaactaaaaaaggactctcgcgaggcatacgtgccccagcagaacctgtttagggacaggagcggcgaggagccagaggagatgcgagcatctcgatttaacgcgggtcgcgagctgcgccacggtctggatcgaagacgggtgctgcaagacgaggattttgaggtcgatgaagtcacagggatcagcccagctagggcacatgtggccgcggccaacctagtctcggcctacgagcagaccgtgaaggaggagcgcaacttccaaaaatcttttaacaaccatgtgcgcaccctgattgcccgcgaggaagtgaccctgggtctgatgcatctgtgggacctgatggaggctatcgcccaaaaccccactagcaaaccactgacagctcagctgtttctggtggttcaacatagcagggacaacgaggcattcagggaggcgttgttgaacatcaccgagcctgatgggagatggctgtatgatctgatcaacatcctgcaaagtattatagtgcaggaacgtagcctgggtttggctgagaaagtggcagctatcaactactcggtcttgagcctgggcaaatactacgctcgcaagatctacaagaccccctacgtacccatagacaaggaggtgaagatagatgggttttacatgcgcatgactctaaaggtactaactctaagcgacgatctgggggtgtatcgcaatgacaggatgcatcgcgcggtgagcgccagtaggaggcgcgagctgagcgacagagaacttatgcacagcttgcaaagagctctaacgggggccgggactgatggggagaactactttgacatgggagcggacttgcaatggcaacccagtcgcagggccatggaggctgcagggtgtgagcttccttacatagaagaggtggatgaagtcgaggacgaggagggcgagtacttggaagactgatggcgcgacccgtatttttgctagatggaacagcagcaggcaccggaccccgcaatgcgggcggcgctgcagagccagccgtccggcattaactcctcggacgattggacccaggccatgcaacgcataatggcgctgacgacccgcaaccccgaagcctttagacagcaaccccaggccaaccgcctttcggccatactggaggccgtagtgccctcccgctccaaccccacccacgagaaggtcctggctatcgtgaacgcgctggtggagaacaaggccatccgtcccgatgaggccgggctggtatacaatgctctcttggagcgcgtggcccgttacaacagcagcaacgtgcaaaccaacctggaccggatggtgaccgatgtgcgcgaggccgtgtctcagcgcgagcggttccagcgcgacgccaacttggggtcgttggtagcgctaaacgcttttctcagcacccagcccgccaacgtgccccgtggtcagcaagactatacaaactttttgagtgcattgagactcatggtagctgaggtgccccagagcgaggtgtaccagtccgggccagattacttcttccagaccagcagacagggcttgcagacagtgaacctgactcaggctttcaaaaacctgaagggtctctggggagtgcacgccccagtaggggatcgcgcgaccgtgtctagcttgctgactcccaactcccgcctgctgctgctgctggtatccccctttactgacagcggtagcatcgaccgcaactcctacttgggctacctgcttaacctgtatcgcgaggccataggacagagccaggtggacgaacagacctatcaagaaatcacccaagtgagccgcgccctgggtcaggaagacacgggcagtttggaagccaccctgaacttcttgttaaccaaccggtcgcagaagatccctcctcagtatgcgcttaccgctgaggaggagcggatccttagatacgtgcaacagagcgttggattgttcctgatgcaggagggggcgacacctaccgccgcgctggacatgacagctcgaaacatggagcccagcatgtatgctagtaacaggcctttcattaacaaactgctggactacctgcacagggcggccgccatgaactctgattatttcaccaatgctatcctgaacccacactggctgcccccacctggtttctacactggcgagtacgacatgcccgaccccaatgacgggttcctgtgggacgatgtagacagcagcatattctccccgcctcccggttatacagtttggaagaaggaagggggcgatacaaggcactcttccgtgtcgctgtccagaacggctggtgctgccgcgaccgtgcccgaagctgcaagtcctttccctagcttgcccttttcactaaacagcgttcgcagcagtgaacttgggagaataacccgcccgcgcttgatgggcgaggatgagtacttgaatgactctttgttgaggccagagagggaaaagaacttccccaacaatggaatagagagcctggtggataagatgagtagatggaagacctatgcgcaggatcacagagacgagcccaaaatcttgggggctacaagcagaccgacccgtagacgccagcgccacgacaggcagatgggtcttgtgtgggacgatgaggactctgccgatgatagcagcgtgttggacttgggtggaagaggagggggcaacccgttcgctcatctgcgtcccagattcgggcgcatgttgtaaaagtgaaagtaaaataaaaaggcaactcaccaaggccatggcgaccgagcgtgcgttcgttcttttttgttatctgtgtttagtacgatgaggagacgagccgtgctaggcggagcgatggtgtatccggagggtcctcctccttcttacgagagcgtgatgcagcaacaggcggcgatgatacagcccccactggaggctcccttcgtacccccgcggtacctggcgcctacggaagggagaaacagcattcgttactcggagctgtcgcccctgtacgataccaccaagttgtatctggtggacaacaagtcggcggacatcgcctccctgaactatcagaacgaccacagcaacttcctgaccacggtggtgcagaacaatgactttacccccacggaggctagcacccagaccatcaactttgacgagcggtcgcgatggggcggtcagctgaagaccatcatgcacaccaacatgcccaacgtgaacgagtacatgttcagcaacaagttcaaggcgagggtgatggtgtccagaaaggctcctgaaggtgttatagtaaatgacacctatgatcataaagaggatatcttaaagtatgagtggtttgagttcactttaccagaaggcaacttctcagccaccatgaccattgacctgatgaacaatgccatcattgacaactacctggaaattggcagacaaaatggagtgctggaaagtgacattggtgttaagtttgacactagaaactttaggctcgggtgggaccccgaaactaagttaattatgccaggagtctacacttatgaggcattccatcctgacattgttttgctgcctggctgcggggtagactttactgaaagccgacttagcaacttgcttggcatcaggaaaagacatccattccaggagggtttcaaaatcatgtatgaagatcttgaagggggtaatattcctgcccttttggatgtcactgcctatgaggaaagcaaaaaggataccactactgaaacaaccacactggctgttgcagaggaaactagtgaagatgataatataactagaggagatacctatataactgaaaaacaaaaacgtgaagctgcagctgctgaagttaaaaaagagttaaagatccaacctctagaaaaagacagcaagagtagaagctacaatgtcttggaagacaaaatcaacacggcctaccgcagctggtacctgtcctacaattacggtaaccctgagaaaggaataaggtcttggacactgcttaccacttcagatgtcacctgtggggcagagcaggtctactggtcgctccctgacatgatgcaagacccagtcaccttccgctccacaagacaagtcaacaactacccagtggtgggtgcagagcttatgcccgtcttctcaaagagtttctacaatgagcaagccgtgtactctcagcagctccgacaggccacttcgctcacgcacgtcttcaaccgcttccctgagaaccagatcctcatccgcccgccggcgcccacaattaccaccgtcagtgaaaacgttcctgctctcacagatcacgggaccctgccgttacgcagcagtatccggggagtccagcgcgtgaccgttactgacgccagacgccgcacctgtccctacgtttacaaggccctgggcatagtcgcgccgcgcgttctttcaagccgcactttttaaaaaacaaaaaatgtccattctcatctcgcccagtaataataccggttggggactgtatgcgcccaccaagatgtatggaggcgcccgcatacgctctacccagcaccctgtgcgcgttcgcggtcatttccgcgctccatggggcgcactcaagggtcgtacccgcactcggaccacggtcgatgatgtgatcgaccaggtggtcgccgatgctcgtaattatactcctactgcgcctacatctactgtggatgcagttattgacagtgtggtggcagacgcccgcgcctatgctcgccggaagagccgaaggaggcgcattgctaggcgccacagggctactaccgccatgcgagctgcaaaagctattctgcggagggccaaacgtgtggggcgaagagccatgcttagagcggccagacgcgcggcttcaggtgccagcagcggcaggtcccgcaggcgcgcggccacggcggcagcagcggccattgccaacatggcccaaccgcgaagaggcaatgtgtactgggtgcgtgatgccactaccggccagcgcgtgcccgtgcgcacccgcccccctcgcacttagaagatactgagcagtctccgatgttgtgtcccagcggcaagtatgtccaagcgcaaatacaaggaagagatgctccaggtcatcgcgcctgaaatctacggtccaccggtgaaggatgaaaaaaagccccgcaaaatcaagcgggtcaaaaataacaaaaaggaagaagatgacgctgatgggctggtggagtttgtgcgcgagttcgccccaagacggcgcgtgcagtggcgcgggcgcaaagtgcgtcaagtgctcagacccgggaccactgtggtctttacacctggcgagcgttccagcactacttttaaacggtcctatgatgaggtgtacggggatgacgatattcttgagcaggcggcagaccgccttgacgagtttgcttatggcaagcgcactagatccagtcccaaagaggaggcggtgtccattcccttggatcatggaaatcccacccccagcctcaaaccagtcaccctgcagcaagtgctgcccgtgcctgcgcggagaggcgtaaagcgcgagggtgaggacctatatcccaccatgcagctaatggtgcccaagcgccagaggctagaagacgtactggagaaaatgaaagtggatgccgatatccagcctgaggttaaagtaagacctattaaggaagtggcgccaggtttgggagtacaaaccttcgacatcaagattcccaccgagtccatggaagtgcagaccgaacctgcaaaacccacaaccacctcaattgaggtgcaaacggaaccctggatgcccgcgcccgttgccgcccccagcaccactcgaagatcacgacgaaagtacggcccagcaagtctgctaatgcccaactatgctctgcacccatccatcattcccactccgggttacagaggcactcgctactatcgaaaccggagcaacacctctcgccgccgcaaaccacctgcaagtcgcactcgccgtcgccgccgccgcaacactgccagcaaattgactcccgccgccctggtgcggagagtgtaccgcgatggtcgcgctgaacctctgacgctgccgcgcgcgcgctaccatccaagcatcaccacttaatgactgttgacgctgcctccttgcagatatggccctcacttgccgccttcgcgtccccattactggctaccgaggaagaaactcgcgccgtagaaggatgttggggcgagggatgcgccgccacagacgaaggcgcgctatcagcagacgattagatggtggctttttgccagctcttatacccatcatcgccgcagcgatcggggcgataccaggcatagcttccgtggcggttcaggcctcgcagcgccactaacattggaaaaacttataaataaaaaatagaatggactctgacgctcctggtcctgtgactatgtttttgtagagatggaagacatcaatttttcatccctggctccgcgacacggcacgaggccgtacatgggcacctggagcgacatcggcacgagccaactgaacgggggcgccttcaattggagcagtatctggagcgggcttaaaaattttggctcgaccgtaaaaacctatgggaacaaagcttggaacagcagcacagggcaggctctgagaaataagcttaaggaacaaaacttccaacagaaggtggtcgatgggatcgcctctggtattaacggcgtagtggatctggccaaccaggctgtacaaaaacagataaacagccgactggacccgccgcccgcaacccctggtgaaatggaagtggaggaagagcttcctccgctggaaaagcggggcgacaagcgtccgcgacccgagctggagcagacgctggtgacgcgcgcagacgagcccccttcatacgaggaggcagtaaagctaggaatgcccactactaggcccgtagctcacatggctaccggggtgatgaaaccttctcagtcacatcgacccgccaccttggacttgcctcctccccctgcttctgcggcgcttgttcccaaacctgtcgctaccagaaagcccaccgccgtacagcccgtcgccgtagccagaccgcgtcctgggggcacaccgcgcccgaaagcaaactggcaaagtactctgaacagcatcgtgggtctgggcgtgcagagtgtaaagcgccgtcgctgctattaattaaatatggagtagcgcttaacttgcttgtctgtgtgtatgtatcatcaccacgccgccgcagcagaggagaaaggaagaggtcgcgcgccgaggctgagttgctttcaagatggccaccccatcgatgatgccccaatgggcatacatgcacatcgccggacaggatgcttcggagtacctgagtccgggtctggtgcagttcgcccgtgcaacagacacctacttcagtatggggaacaaatttagaaaccccacagtggcgcccacccacgatgtgaccaccgaccgtagccagcgactgatgctgcgcttcgtacccgttgaccgggaagacaatacctactcttacaaagttcgctacacgctggctgtaggcgacaacagagtgcttgacatggccagcacattctttgacattcggggggtgcttgatagaggtcctagctttaagccatattctggcacagcttacaattcactggctcctaagggcgcgcccaatacatctcagtggatagttacagcaggagaagaaagagcagtaactaccaccacaaacacatttggcattgcttccatgaagggagacaatattactaaagaaggtttagaaattgggaaagacattactgcagacaacaagcccatttatgccgataaaacatatcagccagagcctcaagttggagaagaatcatggactgatactgatggaacaaatgaaaagtttggaggtagagctcttaaaccagctaccaaaatgaagccatgctacgggtcttttgcaagacctacaaatataaaagggggccaagctaaaaacagaaaagtaaaaccaaccgaaggagatgttgagactgaggagccagatattgatatggaattttttgatggtagagaagctgctgacgctttttcgcctgaaattgtgctttacacggaaaatgtcaatttagaaactccagacagccatgtagtttacaagccaggaacttctgatgataactctcatgcaaatttgggtcaacaagccatgcctaacagacccaattacattggcttcagggataactttgtaggcctaatgtactacaacagtactggaaatatgggagttttggctggccaagcatcacaactgaatgcagtggttgacttgcaggacagaaacactgaactgtcatatcagcttttgcttgattctctgggagacagaaccagatacttcagtatgtggaaccaggctgtggacagttatgatcccgatgttcgcattattgaaaatcacggcatcgaggatgaactgcctaattactgttttcctctggatggcataggaccagcgaaaacatatcaaggcattaaatctaaagacaatggatgggaaaaagatgataatgtttctaaatctaatgaaatagccataggcaacaaccaggctatggaaattaatatccaagctaacctttggagaagttttctgtactccaatgtggctttgtaccttccagatgtttacaagtacacgccaactaacattactctgcccgccaacaccaacacctatgagtacatgaacgggcgagtggtatccccatctctggttgattcatacatcaacattggcgccaggtggtctcttgacccaatggacaatgtgaatccattcaaccaccaccgcaatgctggtctgcgctaccggtccatgcttctgggcaatggtcgttatgtgcctttccacatacaagtgcctcaaaaattctttgctgtcaagaacctacttcttctacctggctcctacacctatgagtggaacttcagaaaggatgtgaacatggtcctgcaaagttcccttggaaatgacctcagaacagatggtgctaccataagtttcaccagcatcaatctgtatgccaccttcttccccatggctcacaacacagcttccacccttgaagccatgctgcgcaacgataccaatgatcagtcattcaacgactacctctctgcagctaacatgctttaccccatccctgccaatgcaaccaacattccaatttccatcccatctcgcaactgggcagccttcaggggctggtccttcactaggctcaaaaccaaggagactccatctcttggatcagggttcgatccctacttcgtatattctggatctattccctacctggatggcaccttttaccttaaccacactttcaagaaggtctccatcatgtttgactcctcagtcagctggcctggcaatgacaggctgttgagcccaaatgagtttgaaatcaagcgcactgtggacggggaagggtacaatgtggcccaatgtaacatgaccaaagactggttcctggttcagatgcttgccaactacaacattggctaccagggcttttacatccctgagggatacaaggatcgcatgtactcctttttcagaaacttccagcctatgagcaggcaggtggttgatgaggttaattacactgactacaaagccgtcaccttaccataccaacacaacaactctggctttgtagggtatcttgcacctactatgagacaaggggaaccttacccagccaattatccatacccgctcatcggaactactgccgttaagagtgtcacccagaaaaagttcctgtgtgacaggaccatgtggcgcattcccttctccagcaacttcatgtccatgggggcccttaccgacctgggacagaacatgctctatgccaactcagcccatgcgctggacatgacttttgaggtggatcccatggatgagcccaccctgctttatcttcttttcgaagtcttcgacgtggtcagagtgcaccagccacaccgcggcgtcatcgaggccgtctacctgcgcacaccgttctcggccggcaacgccaccacataagaagcctcttgcttcttgcaagcagcagctgcagccatgacatgcgggtccggaaacggctccagcgagcaagagctcaaagccatcgtccgagacctgggctgcggaccctatttcctgggaacctttgacaagcgtttcccggggttcatggcccccgacaagctcgcctgtgccatagtcaacactgccggacgcgagacggggggagagcactggctggcttttggttggaacccgcgctccaacacctgctacctttttgatccttttgggttctcggatgagcggctcaaacagatttaccagtttgagtacgaggggctcctgcgccgcagtgcccttgctaccaaaaaccgctgcatcaccctggagaagtccacccaaagcgtgcagggtccgcgctcagccgcctgtggacttttttgctgtatgttccttcatgcctttgtgcactggcccgaccgccccatggacggaaaccccaccatgaagttgctgactggggtgtccaacagcatgctccaatcaccccaagtccagcccaccctgcgccgcaaccaggaggcgctatatcgcttcctaaacacccactcatcttactttcgttctcaccgcgcgcgcatcgaaagggccaccgcgtttgaccgtatgaatatgcaataagtcatgtaaaaccgtgttcaataaacagcactttatttttacatgcactgaggctctggtttttgctcattcgtctcatcattcactcagaagtcaaatggattctggcgggagtcatagtgacccgcgggcagggatacgttgcggaactgtaacctgttctgccacttgaactcgggtatcaccagcttgggaactggaatctcgggaaaggtgtcttgccacaactttctggtcagttgcagggcgccaagcaggtcaggagcagagatcttgaaatcacagttggggccggcattttggacacgggagtttcggtacactgggttgcaacactggaacaccatcaaggctgggtgtctcacgcttgccagcacggtcgggtcactgatggtagccacatccaagtcttcagcattggccatcccaaagggggtcatcttacaggtctgcctgcccatcacgggagcacagcctggcttgtggttgcaatcgcaatgaatggggatcagcatcatcctggcttggtcgggggttatccctgggtacacggccttcatgaaggcttcgtactgcttgaaagcttcctgagccttaattccctcggtgtagaacatcccacaggacttgctggaaaattggttagtagcacagttggcatcattcacacagcagcgggcatcgttgttggccaactggaccacatttctgccccagcggttctgggtgatcttggctctgtctgggttctccttcatagcgcgctgcccgttctcgctcgccacatccatctcgataatgtggtccttctggatcatgatagtgccatgcaggcatttcaccttgccttcgtaatcggtgcatccatgagcccacagagcgcacccggtgcactcccaattattgtgggcgatctcagaataagaatgcaccaatccctgcatgaatcttcccatcatcgctgtcagggtcttcatgctactaaatgtcagcgggatgccgcggtgctcctcgttcacatactggtggcagatacgcttgtactgctcgtgctgctctggcatcagcttgaaagaggttctcaggtcattatccagcctgtacctctccattagcacagccatcacttccatgcccttctcccaggcagataccaggggcaagctcaaaggattcctaacagcaatagaagtagctcctttagatataggatcattattgtcgatcttctcaacactcctcttgccatccttctcaatgatgcgcaccggggggtagctgaagcccacggccaccaactgaacctgttctctttcttcttcgctgtcctggctgatgtcttgcagagggacatgcttggtcttcctgggcttcttcttgggagggattgggggaggactgttgctccgttccggagacagggatgaccgcgaagtttcgcttaccagtaccacctggctctcgatagaagaattggaccccacgcgacggtaggtgttcctcttcgggggcagaggtggaggtgactgagatgggctgcggtctggccttggaggcggatggctggcagagcccattccgcgttcgggggtgtgctcccgttggcggtcgcttgactgatttcctccgcggctggccattgtgttctcctaggcagagaaacaacagacatggaaactcagccatcactgccaacatcgctgcaagcgccatcacacctcgcccccagcagcgacgaggaggaaagcttaaccaccccaccacccagtcccgctaccaccacctctaccctcgatgatgaggaggaggtcgacgcagcccaggagatgcaggcgcaggataatgtgaaagcggaagagattgaggcagatgtcgagcaggacccgggctatgtgacaccggcggagcacgaggaggagctgaaacgttttctagacagagaggatgacgaccgcccagagcatcaagcagatggcgatcaccaggaggctggcatcggggatcatgttgccgactacctcaccgggcttgggggggaggacgtgctcctcaaacatctagcaaggcagtcgaacatagttaaagacgcactactcgacctcaccgaagtgcccatcagtgtggaagagcttagccgcgcctacgagctgaacctcttttcgcctcagataccccccaagcggcagccaaacggcacctgcgaggccaaccctcgactgaacttctatccggcttttactgtccccgaagtgctggccacctaccacatcttttttaagaaccaaaagattccagtctcctgccgcgccaaccgcacccgcgccgatgcccttctcaacttgggtccgggagctcgcttacctgatatagcttccttggaagaggttccaaaaatctttgagggtctgggaagtgatgagactcgggccgcaaatgctctgcaacagggagagaatggcatggataaacatcacagcgctctagtggaactggagggtgacaatgcccggcttgcagtgctcaagcgcagtatcgtggtcacccattttgcctaccccgctgttaacctgccacccaaagtcatgagcgctgtcatggaccatctgctcatcaaacgagcaagtccactttcagaaaaccagaacatgcaggatccagacgcctcggacgatggcaagccggtagtcagtgacgagcagctatctcgctggctgggtaccaactccccccgagatttggaagaaaggcgcaagcttatgatggctgtagtgctagtaactgttgagctggagtgtctgcgccgcttttttaccgaccccgagaccctgcgcaaactagaggagaacctgcactacaccttcagacatggcttcgtgcgccaggcatgcaagatttccaacgtggagctcaccaacctggtttcatacatgggcattttgcatgagaaccggctagggcagagcgttctgcacaccaccctgaagggggaggcccgccgcgactacatccgagactgtgtctacctctacctctgccatacctggcagactggtatgggtgtgtggcaacagtgtttggaagagcagaacctcaaagaactggacaagctcttgcagagatcccttaaagccctgtggacaggttttgacgagcgcaccgtcgcctcggacctggcggacatcatcttccccgagcgtcttagggttactctgcgaaacggcctgccagacttcatgagccagagcatgcttaacaactttcgctctttcatcctggaacgctccggtatcctgcctgtcacctgttgtgcgctgccctccgactttgtgcctcttacctaccgcgaatgcccaccgccgctatggagccactgctacctgttccgcctggccaactacctctcctaccactcggatgtgatagaggatgtgagcggagacggcctgctggaatgccactgccgatgcaatttatgcacaccccaccgctccctcgtctgcaacccacagttgctaagcgagacccagatcatcggcaccttcgagttgcagggtcccaacagtgaaggcgaggggtcttctccgggtcatagtctgaaactgacaccggggctgtggacctccgcctacctgcgcaagtttcatcccgaggactaccacccctatgagatcaggttctatgaggaccagacacatcctcccaaagtcgagctctcagcctgcgtcattacccagggagcaattctggcccaattgcaagccatccaaaaatcccgccaagaatttctgctaaaaaagggaagcggggtctaccttgacccccagaccggtgaggagctcaacacaagattcccccaggatgtcccatcgccgaggaagcaagaagctgaaggtgcagctgtcgcccccagaggatatgaaggaacactgggacagtcaggcagaggaggagatggaagattgggacagccaggcagaggaggtggacagcctggaggaagacagtttggaggaggaagacgaggaggcagaggaggtggaagaagcaaccgccgccaaacagttgtcatcggcggcggagacaagcaagtccccagacagcagcacggctaccatctccgctccgggtcggggagcccagcggcggcccaacagtagatgggacgagaccgggcgattcccaaacccaaccaccgcttccaagaccggtaagaaggagcgacagggatacaaatcctggcgtggacataaaaacgctatcatctcctgcttgcatgaatgcgggggcaacatatcctttacccggcgatacctgctcttccaccacggtgtgaacttcccccgcaatatcttgcattactaccgtcacctccacagcccctactgcagtcagcaagtcccgacaaccccgacagaaaaagacagcagcgacaacggtgaccagaaaaccagcagttagaaaatccacaacaagtgcagcaggaggaggactgaggatcacagcgaacgagccagcgcagaccagagagctgaggaaccggatctttccaaccctctatgccatcttccagcagagtcgggggcaagagcaggaactgaaagtaaaaaaccgatctctgcgctcgctcaccagaagttgtttgtatcacaagagcgaagaccaacttcagcgcactctcgaggacgccgaggctctcttcaacaagtactgcgcgctgactcttaaagagtagcccttgcccgcgcttattcgaaaacggcgggaatcacgtcacccttggcacctgtcctttgccctcgtcatgagtaaagagattcccacgccttacatgtggagctatcagccccaaatggggttggcagcaggcgcctcccaggactactccacccgcatgaattggcttagcgccgggccctcaatgatatcacgggttaatgatatacgagcttatcgaaaccagttactcctagaacagtcagctctcaccaccacaccccgccaacaccttaatccccgaaattggcccgccgccctggtgtatcaggaaactcccgctcccaccaccgtactacttcctcgagacgcccaggccgaagttcatatgactaacgcaggtgtacagctggcgggcggttccgccctatgtcgtcaccgacctcaacagagtataaaacgcctggtgatcagaggccgaggtatccagctcaacgacgagtcggttagctcttcgcttggtctgcgaccagacggagtcttccaaatcgccggctgtggaagatcttccttcacccctcgtcaggctgtactgactttggagagttcgtcctcgcagccccgctcgggcggcatcggaactctccagtttgtggaggagtttactccctctgtctacttcaaccccttctccggctctcctggccagtacccggacgagttcataccgaacttcgacgcaatcagcgagtcagtggatggctatgattgatgtctaatggtggcgcggctgagctagctcgactgcgacacctagaccactgccgccgctttcgctgcttcgcccgggaactcaccgagttcatctacttcgaactccccgaggagcaccctcagggtccggcccacggagtgcggattaccatcgaagggggaatagactctcgcctgcatcgaatattctcccagcgacccgtgctgattgagcgcgaccagggaaatacaaccatctccatctactgcatctgtaaccaccccggattgcatgaaagcctttgctgtcttgtttgtgctgagtttaataaaaactgagttaagaccctcctacggactaccgcttcttcaatcaggactttacaacaccaaccagatcttccagaagacccagacccttcctcctctgatccaggactctaactctaccttaccagcaccatccactactaaccttcccgaaactaacaagcttggatctcatctgcaacaccgcctttcacgaagccttctttctgccaatactaccactcccaaaaccggaggtgagctccgcggtctccctactgacgacccctgggtggtagcgggttttgtaacgttaggagtagttgcgggtgggcttgtgttaatcctttgctacctatacacaccttgctgtgcatatttagtcatattgcgctgttggtttaaaaaatgggggccatattagtcgtgcttgctttactttcgcttttgggtctgggctctgctaatctcaatcctcttgatcacgatccatgtctagacttcgacccagaaaactgcacacttacttttgcacccgacacaagccgtctctgtggagttcttattaagtgcggatgggactgcaggtccgttgaaattacacataataacaaaacatggaacaataccttatccaccacatgggagccaggagttcccgagtggtatactgtctctgtccgaggtcctgacggttccatccgcattagtaacaacacttttattttttctgaaatgtgcgatctggccatgttcatgagcagacagtatgacctatggcctcccagcaaagagaacattgtggcattttctattgcttattgcttggtaacatgcattatcactgctatcatttgtgtgtgcatacacttgcttatagttattcgccctagacaaagcaataaggaaaaagagaaaatgccttaacctttttactcataccttttctttacagcatggctactgttacagctctaattattgccagcattgtcactgtcgctcacgggcaaacaattgtccatattaccttaggacataatcacacccttgtagggcccccaattacttcagaggttatttggaccaaacttggaagtgttgattattttgatataatttgcaacaaaactaaaccaatatttgtaatctgtaacagacaaaatctcacgttaattaatgttagcaaaatttataacggttactattatggttatgacagatccagtagtcaatataaaaattacttagttcgcataactcagcccaaatcaacagtgccaactatgacaataattaaaatggctaataaagcattagaaaattttacatcaccaacaacgcccaatgaaaaaaacattccaaattcaatgattgcaattattgcggcggtggcattgggaatggcactaataataatatgcatgttcctatatgcttgttgctataaaaagtttcaacataaacaggatccactactaaattttaacatttaattttttatacagatgatttccactacaatttttatcattactagccttgcggctgtaacttatggccgttcacacctaactgtacctgttggctcaacatgtacactacaaggaccccaacaaggctatgtcacttggtggagaatatatgataatggagggttcgctagaccatgtgatcagcctggtacaaaattttcatgcaacggaagagacttaaccataattaacataacatcaaatgagcaaggcttctattatggaaccaactataaagatagtttagattacaacattattgtagtgccagccaccacttctgctccccgcaaaaccactttctctagcagcagtgccaaagcaagcacaattcctaaaacagcttctgctatgttaaagcttcaaaaaatcgctttaagtaattccacagccgctcccaaaacaattcctaaatcaacaattggcatcattactgccgtggtagtgggattaattattatatttttgtgcataatgtactatgcctgctgctatagaaaacatgaacaaaaaggtgatgcattactaaattttgacatttaattttttatagaattatgatattgtttcaatcaaataccactaacactatcaatgtgcagactactttaaatcatgacatggaaaaccacactacctcctatgcatacataaacattcagcctaaatacgctatgcatctaaaaatcaccatactaattgtaattggaattcttatactatctgttattctttattttctattctcctatgattagtcgtccccatatagctctgaatgaaatctaagatcttttttttttctcttacagtatggtgaacaccaatcatgatccctagaaatttcttcttcaccatactcatctgtgctttcaatgtctgtgctactttcacagcagtagccactgcaagcccagactgtataggaccatttgcttcctatgcactttttgccttcgttacttgcatctgcgtgtgtagcatagtctgcctggttattaattttttccaactggtagactggatctttgtacgaattgcctacctacgtcaccatcccgaataccgcaatcaaaatgttgcggcacttcttaggcttatttaaaaccatgcaggctatgctaccagtcattttaattctgctactaccctgcattgccctagcttccaccgccactcgcgctacacctgaacaacttagaaaatgcaaatttcaacaaccatggtcatttcttgattgctaccatgaaaaatctgatttccccacatactggatagtgattgttggaataattaacatactttcatgtacatttttctcaatcacaatataccccacatttaattttgggtggaattctcccaatgcactgggttacccacaagaaccagatgaacatattccactacaacacatacaacaaccactagcactggtagagtatgaaaatgagccacaaccttcactgcctcctgccattagttacttcaacctaaccggcggagatgactgaaatactcaccacctccaattccgccgaggatctgcttgatatggacggccgcgtctcagaacagcgactcgcccaactacgcatccgccagcagcaggaacgcgtgaccaaagagctcagagatgtcatccaaattcaccaatgcaaaaaaggcatattttgcttggtaaaacaagccaaaatatcctacgagatcaccgctactgaccatcgcctctcttacgaacttggcccccaacgacaaaaatttacatgcatggtgggaatcaaccctatagttatcactcagcaaagtggagatactaaggggtgcattcactgctcttgtgattccatcgagtgcacctacaccctgctaaagaccctatgcggcttaagagacctgctacccatgaattaaaaattaataaaaaatcacttacttgaaatcagcaataaggtctctgttgaaattttctcccagcagcacctcacttccctcttcccaactctggtattctaaaccccgttcagcggcatactttctccatactttaaaggggatgtcaaattttaactcctctcctgtacccacaatcttcatgtctttcttcccagatgaccaagagagtccggctcagtgattccttcaaccctgtctacccctatgaagatgaaagcacctcccaacacccctttataaacccagggtttatttccccaaatggctttacacaaagcccagacggagttcttactttaaaatgtttaaccccactaacaaccacaggcgggtctctacagttaaaagtgggagggggtcttacaatagatgacaccgacggttttttgaaagaaaacataagtgccgccacaccactcgttaagactggtcactctataggtttgtcgctaggacccggattaggaacaaatgaaaacaaactttgtgccaaattgggagaaggacttacattcaattccaacaacatttgcattgatgacaatattaacaccctatggacaggagttaaccccaccacagccaactgtcaaataatggcctccagtgaatctaatgattgcaaattaattctaacactagttaaaactggagcccttgtcactgcatttgtttatgttataggagtatctaacgattttaatatgctaactacacataaaaatataaatttcactgcagagctgttttttgattctactggtaatttactaactagcctttcatccctaaaaactccacttaatcataaatcagggcaaaacatggctactggtgcccttactaatgctaaaggtttcatgcccagcacaactgcctatcctttcaatgttaattccagagaaaaagaaaactacatttacggaacttgttactacacagctagtgatcacactgcttttcccattgacatatctgtcatgcttaaccaaagagcattaaataatgagacatcatattgtattcgtgtaacttggtcctggaacacaggagttgccccagaagtgcaaacctctgctactaccctagtcacctctccatttaccttttactacattagagaagacgactgacaaaataaagtttaacttgtttatttaaaatcaattcataaaattcgagtagttattttgcctcccccttcccatttaacagaatacaccaatctctccccacgcacagctttaaacatttggataccattacagatagacatagttttagattccacattccaaacagtttcaaagcgagccaatctggggtcagtgatacataaaaatgcatcgggatagtcttttaaagcgctttcacagtccaactgctgcggatgcgactccggggtctggatcacggtcatctggaagaagaacgatgggaatcataatccgaaaacggaatcgggcgattgtgtctcatcaaacccacaagcagccgctgtctgcgtcgctccgtgcgactgctgcttataggatcgggatccacagtgtcctgaagcatgattttaatagcccttaacattaactttctggtgcggtgcgcgcagcaacgcattctgatttcacttagattactacagtaggtacagcacattatcacaatattgtttaataaaccataattaaaagcgctccagccaaaactcatatcagatataatcgcccctgcatgaccatcataccaaattttaatataaattaaatgtcgttccctcaaaaacacactacccacatacataatctcttttggcatgtgcatattaacaatctgtctgtaccatggacaacgttggttaatcatgcaacccaatataaccttccgaaaccacactgccaacaccgctcccccagccatgcattgaagtgaaccctgccgattacaatgacaatgaagaacccaattttctcgaccatgaatcacttgagaatgaaaaatatctatagtagcacaacaaagacataaatgcatgcatcttctcataattcttaactcctcgggatttagaaacatatcccaaggaatgggaaactcttgcagaacagtaaagctggcagaacaaggaagaccacgaacacaacttacactatgcatagtcatagtatcacaatctggcaacagcgggtggtcttcagtcatagaagctcgggtttcattttcctcacatcgtggtaactgggctctggtgtaagggtgatgtctggcgcaagatgtcgagcgcgcgcgcaaccttgtcataatggagttgcttcctgacattctcgtattttgtatagcaaaacgcggccctggcacaacacactcttcttcgtcttctatcctgccgcttagtgtgttccgtctgataattcaagtacagccacactcttaagttggtcaaaagaatgctggcttcagttgtaatcaaaactccatcatatttaattgttctaaggaaatcatccacggtagcatatgcaaatcccaaccaagcaatgcaactggattgcgtttcaagcagcacaggagagggaagagacggaagaatcatgttaatttttattccaaacgatctcgcagtacttcaaattgtagatcgcgcagatggcatctatcgcccccactgtgttggtgaaaaagcacagctaaatcaaaagaaatgcgattttcaaggtgctcaacggtggcttccaacaaagcctccacgcgcacatccaaaaacaaaagaataccaaaagaaggagcattttctaactcctcaaacatcatattacattcttgcaccattcccagataattttcagctttccaaccttgaattattcgtgtcagttcttgtggtaaatccaaaccacacattacaaacaggtcccgaagggcgccctccaccaccattcttaaacacaccctcataatgacaaaatatcttgctcctgtgtcacctgtagcaaattaagaatggcatcatcaattgatatgcccttggctctaagttcttctctaagttctagttgtaaatactctctcatattatcaccaaactgcttagccagaagccccccgggaacaatagcaggggacgctacagtgcagtacaagcgcagacctccccaattggctccagcaaaaacaagattagaataagcatactgggaaccaccagtaatatcatcaaagttgctggaaatataatcaggcagagtttcttgtaaaaattgaataaaagaaaaattttccaaaaaaacattcaaaacctctgggatgcaaatgcaataggttaccgcgctgcgctccaacattgttagttttgaattagtctgtaaaataaaagaaacaaacgtcatatcatagtagcctgtcgaacaggtggataaatcagtctttccatcacaagacaagccacagggtctccagctcgaccctcgtaaaacctgtcatcgtgattaaacaacagcaccgaaagttcctcgcggtggccagcatgaataattcttgatgaagcatataatccagacatgttagcatcagttaaagagaaaaaacagccaacatagcctctgggtataattatgcttaattttaagtttagcaaagccacccctcgcggatacaaagtaaaaggcacaggagaataaaaaatataattatttctctgctgctgttcaggcaacatcgcccctggtccctctaaatacacatacaaagcctcatcagccatggcttaccagacaaagtatagcgggcgcacaaagcacaagctctaaagaagctctaaagacgctctccaagctctccacaatatatacacaagccctaaactgacgtaatgggagtaaagtgtaaaaaatcccgccaagcccaacacacaccccgaaactgcgtcagcagggaaaagtacagtttcacttccgcaaacccaacacgcgtaacttcctctttctcacggtacgtcacatccgattaacttgcaacgtcattttcccacggccgccccgcccatgttagtcattcaccccacagccaatcaccacacagcgcgcacttttttaaattacctcatttacatgttggcaccattccatctataaggtatattattgatgatgggccagtgaattgtaatacgactcactatagggcgaattgggccctctagatgcatgctcgagcggccgccagtgtgatggatatctgcagaattcgcccttccttaattaacctgcag

SEQ ID NO: 6 - DNA, 35538 bp, Adenovirus B16
  MISC_FEATURE (1)..(35538): Complete Genome
cctgcaggcattatcaataatataccttatagatggaatggtgccaacatgtaaatgaggtaatttaaaaaagtgcgcgctgtgtggtgattggctgcggggtgaacggctaaaaggggcgggcaatgctgggatgtgacgtaacttatgtgggaggagttatgttgcaagttatcgcggtaaaggtgacgtaaaacgaggtgtggtttggacacggaagtagacagttttcccacgtttactgacaggatatgaggtagttttgggcggatgcaagtgaaaattctccattttcgcgcgaaaactgaatgaggaagtgaatttctgagtcatttcgcggttatgacagggtggagtatttgccgagggccgagtagactttgaccgtttacgtggaggtttcgattaccgtgtttttcacctaaatttccgcgtacggtgtcaaagtcctgtgtttttacgtaggtgtcagctgatcactagggtatttaaacctgtcgagttccgtcaagaggccactcttgagtgccagcgagaagagttttctcctccgcgctgcgagtcagttttgcgctttgaaaatgagacacctgcgattcctgccacaggagattatctccagcgagaccgggatcgaaatactggagtttgtggtaaataccctgatgggagatgacccggaaccgccagtgcagcctttcgatccacctacgctgcacgatctgtatgatttagaggtagacgggcctgatgatcccaatgaggaagctgtaaatgggttttttactgattctatgctgctagctgccgatgaaggattggacataaaccctcctcctgagacccttgataccccaggggtggttgtggaaagcggcagaggtgggaaaaaattgcctgatctgggagcagctgaaatggacttgcgttgttatgaagagggttttcctccgagtgatgatgaagacggggaaactgaacagtccatccataccgcagtgaatgagggagtaaaagctgccagcgatgtttttaagttggactgtccggagctgcctggacatggctgtaagtcttgtgaatttcacaggaataacactggaatgaaagaactattgtgctcgctttgctatatgagaatgcactgccactttatttacagtaagtgtatttaagtgaaatttaaaggaatagtgtagctgtttaataactgttgaatggtagatttatgtttttgcttgcgattttttgtaggtcctgtgtctgatgatgagtcaccttctcctgattcaactacctcacctcctgaaattcaggcgcccgtacctgcaaacgtatgcaagcccattcctgtgaagcctaagtctgggaaacgccctgctgtggataagcttgaggacttgttggagggtggggatggacctttggaccttagtacccggaaactgccaaggcaatgagtgccctgcagctgtgtttatttagtgacgtcatgtaataaaattatgtcagctgctgagtgttttattgcttcttgggtggggacttggatatataagtaggagcagatctgtgtggttagctcatagcaacctgctgccatccatggaggtttgggctatcttggaagacctgagacagactaggctactgctagaaaacgcctcggacggagtctctggcttttggagattctggttcggtggcgatctagctaggctagtgtttaggataaaacaggactatagggaagaatttgaaaagttattggacgacagtccaggactttttgaagctcttaacttgggccatcaggctcattttaaggagaaggttttatcagttttagatttttctactcctggtagaactgctgctgctgtagcttttcttacttttatattggataaatggatccgccaaacccacttcagcaagggatacgttttggatttcatagcagcagctttgtggagaacatggaaggctcgcaggatgaggacaatcttagattactggccagtgcagcctctgggagtagcagggatactgagacacccaccggccatgccagcggttctggaggaggagcagcaggaggacaatccgagagccggcctggaccctccggtggaggagtagctgacttgtttcctgaactgcgacgggtgcttactaggtctacgtccagtggacaggacaggggcattaagagggaaaggaatcctagtgggaataattcaagaaccgagttggctttaagtttaatgagccgtaggcgtcctgaaactgtttggtggcatgaggttcagagcgaaggcagggatgaagtttcaatattgcaggagaaatattcactagaacaacttaagacctgttggttggaacctgaggatgattgggaggtggccattaggaattatgctaagatatctctgaggcctgataaacagtatagaattactaagaagattaatattagaaatgcatgctacatatcagggaatggggcagaggttataatagatacacaagataaagcagcttttagatgttgtatgatgggtatgtggccaggggttgtcggcatggaagcagtaacatttatgaatattaggtttaaaggggatgggtataatggcattgtatttatggctaacactaagctgattctacatggttgtagcttttttgggtttaataatacttgtgtagaagcttgggggcaagttagtgtgaggggttgtagtttttatgcatgctggattgcaacatcaggtagggtcaagagtcagttgtctgtgaagaaatgcatgtttgagagatgtaatcttggcatactgaatgaaggtgaagcaagggtccgccactgcgcagctacagaaactggctgcttcattctaataaagggaaatgccagtgtgaagcataatatgatctgtggacattcgaatgagaggccttatcagatgctgacctgcgctggtggacattgcaatattctggctaccgtgcatatcgtttcccatgcacgcaagaaatggcctgtatttgaacataatgtgattaccaagtgcaccatgcacataggtggtcgcaggggaatgtttatgccttaccagtgtaacatgaatcatgtgaaggtgatgttggaaccagatgccttttccagagtaagcttaacaggaatctttgatatgaatattcaactatggaagatcctgagatatgatgacactaaaccgagggtgcgcgcatgcgaatgcggaggcaagcatgctagattccagccggtgtgcgtggatgtgactgaagacctgagacccgatcatttggtgcttgcctgcactggagcggagttcggttctagtggtgaagaaactgactaaagtgagtagtgggacgagctgtggaggtgggactttgaggttggtaaggtgggcagattgggtaaattttgttaatttctgtcttgcagctgccatgagtggaagcgcttcttttgaggggggagtatttagcccttatctgacgggcaggctcccaccatgggcaggagttcgtcagaatgtcatgggatccactgtggatgggagacccgtccagcccgccaattcctcaacgctgacctatgccactttgagttcgtcaccattggatgcagctgcagccgccgccgctactgctgccgccaacaccatccttggaatgggctattacggaagcatcgttgccaattccagttcctctaataacccttcaaccctggctgaggacaagctacttgttctcttggctcagctcgaggccttaacccaacgcttaggcgaactgtctaagcaggtggcccagttgcgtgagcaaactcagtctgctgttgccacagcaaagtctaaataaagatcttaaatcaataaataaagaaatacttgttataaaaacaaatgaatgtttatttgatttttcgcgcgcggtatgccctggaccatcggtctcgatcattgagaactcggtggatcttttccagtaccctgtaaaggtgggattgaatgtttagatacatgggcattagtccgtcccgggggtggagatagctccattgaagagcctcttgctccggggtagtgttataaatcacccagtcatagcaaggtcggagtgcatggtgttgcacaatatcttttaggagcagactaattgcaacggggaggcccttagtgtaggtgtttacaaatctgttgagctgggacgggtgcatccggggtgaaattatatgcattttggactggatcttgaggttggcaatgttgccgcctagatcccgtctggggttcatattgtgcagaaccaccaagacagtgtatccggtgcacttgggaaatttatcatgcagcttagagggaaaagcatgaaaaaatttggagacgcctttgtgaccccccagattctccatgcactcatccataatgatagcgatggggccgtgggcagcggcacgggcgaacacgttccgggggtctgaaacatcatagttatgctcctgagtcaggtcatcataagccattttaataaactttgggcgaagggtgccagattgggggatgaaagttccctctggcccgggagcatagtttccctcacatatttgcatttcccaggctttcagttcagagggggggatcatatccacctgcggggctataaaaaatactgtttctggagccggggtgattaactgggatgagagcaaattcctaagcagctgagacttgccgcacccagtgggaccgtaaatgaccccaattacgggttgcagatggtagtttagggagcgacagctgccgtcctcccggagcaggggggccacttcgttcatcatttcccttacatggatattttcccgcaccaagtccgttaggaggcgctctcccccaagggatagaagctcctggagcgaggagaagtttttcagcggcttcagcccgtcagccatgggcattttggaaagagtctgttgcaagagctcgagccggtcccagagctcggtgatgtgctctatggcatctcgatccagcagacctcctcgtttcgcgggttgggacggctcctggagtagggaatcagacgatgggcgtccagcgctgccagggtccgatccttccatggtcgcagcgtccgagtcagggttgtttccgtcacggtgaaggggtgcgcgcctggttgggcgcttgcgagggtgcgcttcagactcatcctgctggtcgagaaccgctgccgatcggcgccctgcatgtcggccaggtagcagtttaccatgagttcgtagttgagcgcctcggccgcgtggcctttggcacggagcttacctttggaagttttatggcaggcggggcagtagatacatttgagggcatacagcttgggcgcgaggaaaatggattcgggggagtatgcatccgcaccgcaggaggcgcagacggtttcgcactccacgagccatgtcagatccggctcatcggggtcaaaaacaagttttccgccatgttttttgatgcgtttcttacctttggtttccatgagttcgtgtccccgctgggtaacaaagaggctgtccgtgtccccgtagactgactttatgggcctgtcctcgagcggagtgccgcggtcctcttcgtagaggaacccagcccactctgatacaaaagcgcgtgtccaggccagcacaaaggaggccacgtgggaggggtagcggtcgttgtcaaccagggggtccaccttctctacggtatgtaaacacatgtccccctcctccacatccaagaatgtgattggcttgtaagtgtaggccacgtgaccaggggtccccgccgggggggtataaaagggggcgggcctctgttcgtcttcactgtcttccggatcgctgtccaggagcgccagctgttggggtaggtattccctctcgaaggcgggcatgacctctgcactcaggttgtcagtttctaggaacgaggaggatttgatattgacagtaccagcagagatgcctttcataagactctcgtccatctggtcagaaaacacaatcttcttgttgtccagcttggtggcaaatgatccatagagggcattggatagaagcttggcgatagagcgcatggtttggttcttttccttgtccgcgcgctccttggcggcgatgttaagctggacgtactcgcgcgccacacatttccattcagggaagatggttgtcagttcatccggaactattctgactcgccatcccctattgtgcagggttatcagatccacactggtggctacctcgcctcggaggggctcattggtccagcagagtcgacctccttttcttgaacagaaaggggggagggggtctagcatgaactcatcaggggggtccgcatctatggtaaatattcccggtagcaaatccttgtcaaaatagctgatggtggcgggatcatccaaagtcatctgccattctcgaactgccagcgcgcgctcataggggttaagaggggtgccccagggcatggggtgggtgagcgcggaggcatacatgccacagatatcgtagacatagaggggctcttcgaggatgccgatgtaagtgggataacagcgcccccctctgatgcttgctcgcacatagtcatagagttcatgtgagggggcgagaagacccgggcccagattggtgcggttgggtttttccgccctgtaaacgatctggcgaaagatggcatgggaattggaagagatagtaggtctctggaatatgttaaaatgggcatgagggaggcctacagagtcccttatgaagtgggcatatgactcttgcagcttggctaccagctcggcggtgacaagtacgtctagggcacagtagtcgagagtttcctggatgatgtcataacgcggttggtttttcttttcccacagctcgcggttgagaaggtattcttcgcgatccttccagtactcttcgaggggaaacccgtctttttctgcacggtaagagcccaacatgtagaattgattgactgccttgtagggacagcatcccttctccactgggagagagtatgcttgggctgcattgcgcagcgaggtatgagtgagggcaaaagtgtccctgaccatgactttgaggaattgatacttgaagtcgatgtcatcacaggccccctgttcccagagttggaagtccacccgcttcttgtaggcggggttgggcaaagcgaaagtaacatcattgaagaggatcttgccggccctgggcataaaatttcgggtgattctgaaaggctgagggacctctgctcggttattgataacctgagcggccaagacgatctcatcaaagccattgatgttgtgccccactatgtacagttctaagaatcgaggtgtgcccctgacatgaggcagcttcttgagttcttcaaaagtgaggtctgtagggtcagtgagagcatagtgttcgagggcccattcgtgcaggtgagggttcgctttgaggaaggaggaccagaggtccactgccagtgctgtttgtaactggtcccggtactgacgaaaatgctgcccgactgccatcttttctggggtgacgcaatagaaggtttgggggtcctgctgccagcgatcccacttgagttttatagccaggtcataggcgatgttgacgagccgctggtctccagagagtttcatgaccagcatgaaggggattagctgcttgccaaaggaccccatccaggtgtaggtttccacatcgtaggtgaggaagagcctttctgtgcgaggatgagagccaatcgggaagaactggatctcctgccaccagttggaggaatggctgttgatgtgatggaagtagaactccctgcgacgcgccgagcattcatgcttgtgcttgtacagacggccgcagtactcgcatcgattcacgggatgcacctcatgaatgagttgtacctgacttcctttgacgagaaatttcagtggaaaattgaggcctggcgcttgtacctcgcgctctactatgttgtctgcatcggcatgaccatcttctgtctcgatggtggtcatgctgacgagccctcgcgggaggcaagtccagacctcggcgcggcaggggcggagctcgaggacgagagcgcgcaggtcggagctgtccagggtcctgagacgctgcggagtcaggttagtaggcagtgtcaggagattgacttgcatgatcttttcgagggcgtgagggaggttcagatggtacttgatctccacgggtccgttggtggagatgtcgatggcttgcagggttccgtgccccttgggcgctaccaccgtgcccttgtttttccgtttgggcggcggtggctctgttgcttcttgcatgtttagaagcggtgtcgagggcgcgcaccgggcggcaggggcggctcgggacccggcggcatggccggcagtggtacgtcggcgccgcgcgcgggtaggttctggtactgcgccctgagaagacttgcatgcgcgacgacgcggcggttgacatcctggatctgacgcctctgggtgaacgctaccggccccgtgagcttgaacctgaaagagagttcaacagaatcaatctcggtatcgttgacggcggcttgcctaaggatttcttgcacgtcgccagagttgtcctggtaggcgatctcggccatgaactgctcgatctcttcctcttgaagatctccgcggcccgctctctcgacggtggccgcaaggtcgttggagatgcgtccaatgagttgagagaatgcattcatgcccgcctcgttccagacgcggctgtagaccacagccccctcgggatctctcgcgcgcatgaccacctgggcgaggttgagctccacgtggcgggtgaagaccgcatagttgcataggcgctggaaaaggtagttgagtgtggtggcgatgtgctcggtgacgaagaaatacatgatccatcgtctcagcggcatctcgctaacatcgcccagcgcttccaagcgctccatggcctcgtagaagtccacggcaaagttgaaaaactgggagttacgcgcggacacggtcaactcctcttccagaagacggatgagttcggcgatggtggtgcgcacctcgcgctcgaaagcccccgggatttcttcctcaatttcttcttcttccactaacatctcttcctcttcaggtggggctgcaggaggagggggaacgcggcgacgccggcggcgcacaggcagacggtcgatgaatctttcaatgacctctccgcggcggcggcgcatggtctcggtgacggcacgaccgttctccctgggtctcagagtgaagacgcctccgcgcatctccctgaagtggtgactgggaggctctccgttgggcagggacaccgcgctgattatgcattttatcaattgccccgtaggtactccgcgcaaggacctgatcgtctcaagatccacgggatctgaaaacctttcgacgaaagcgtctaaccagtcgcaatcgcaaggtaggctgagcactgtttcttgcgggcgggggcggctagacgctcggtcggggttctctctttcttctccttcctcctctttggagggtgagacgatgctgctggtgatgaaattaaaataggcagttttgagacggcggatggtggcgaggagcaccaggtctttgggtccggcttgttggatgcgcaggcgatgggccattccccaagcattatcctgacatctggccagatctttatagtagtcttgcatgagtcgttccacgggcacttcttcttcgcccgctctgccatgcatgcgagtgatcccgaacccgcgcatgggctggacaagtgccaggtccgctacaaccctttctgcgaggatggcttgctgcacctgggtgagggtggcttggaagtcgtcaaagtccacgaagcggtggtaagccccggtgttgattgtgtaggagcagttggccatgactgaccagttgactgtctggtgccccggacgcacaatctcggtgtacttgaggcgcgagtaggcgcgggtgtcaaagatgtaatcgttacaggtgcgcaccaggtactggtagccgatgagaaagtgaggcggcggctggcggtataggggccatcgctctgtagccggggcgccaggggcgaggtcttccagcatgaggcggtgataaccgtagatgtacctggacatccaggtgataccggaggcggtggtggatgcccgcgggaactcgcgtacgcggttccagatgttgcgcagcggcatgaagtagttcatggtaggcacggtttggcccgtgagacgcgcacagtcgttgatgctctagacatacgggcaaaaacgaaagcggtcagcggctcgtctccgtggcctggaggctaagcgaacgggttgggctgcgcgtgtaccccggttcgaatctcggatcaggctggagccgcagctaacgtggtactggcactcccgtctcgacccaggcctgcacaaaacctccaggatacggaggcgggtcgttttttttttgctttttcctggatgggagccagtgctgcgtcaagctttagaacactcagttctcggggctgggagtggctcgcgcccgtagtctggagaatcaatcgccagggttgcgttgcggtgtgccccggttcgagtcttagcgcgccggatcggccggtttccgcgacaagcgagggtttggcagcctcgtcatttctaagaccccgccagccgacttctccagtttacgggagcgagccctcttttttttgttttttgttgcccagatgcatcccgtgctgcgacagatgcgcccccagcaacagcccccttctcagcagcagctacaacaacagccacaaaaggctcttcctgctcctgtaactactgcggctgcagccgtcagcggcgcgggacagcccgcctatgatctggacttggaagagggcgagggattggcgcgcctgggggctccatcgcccgagcggcacccgcgggtgcaactaaaaaaggactctcgcgaggcgtacgtgccccaacagaacctattcagggacaggagcggcgaggagccagaggagatgcgagcatctcgatttaacgcgggtcgcgagctgcgccacggtctggatcgaagacgggtgctgcaagacgaggattttgaggtcgatgaagtgacagggatcagcccagctagggcacatgtggccgcggccaacctagtctcggcctacgagcagaccgtgaaggaggagcgcaacttccaaaaatcttttaacaaccatgtgcgcaccctgatcgcccgcgaggaagtgaccctgggtctgatgcacctgtgggacctgatggaggctatcacccagaaccccactagcaaacccctgacagctcagctgtttctggtggttcaacatagcagggacaacgaggcattcagggaggcgttgttgaatatcaccgagcctgatgggagatggctgtatgatctgattaacatcctgcaaagtattatagtgcaggaacgtagcctgggtttggctgagaaagtggcagctatcaactactcggtcttgagcctgggcaaatactacgctcgcaagatctacaagaccccctacgtacccattgacaaggaggtgaagatagatgggttttacatgcgcatgactctcaaggtgttgactttaagcgacgatctgggggtgtatcgcaatgacaggatgcaccgcgcggtgagcgccagcaggaggcgcgagctgagcgacagagaacttatgcacagcttgcaaagggctctaacgggggccggaactgatggggagaactactttgacatgggagcggacttgcaatggcaacccagtcgcagggccatggaggctgcagggtgtgagcttccttacatagaagaggtggatgaagtcgaggacgaggagggcgagtacttggaagactgatggcgcgacccgtatttttgctagatggaacaacagcaggcaccggaccccgcaatgcgggcggcgctacagagccagccgtccggcattaactcctcggacgattggacccaggccatgcaacgtataatggcgctgacgacccgcaaccccgaagcctttagacagcaaccccaggccaaccgcctttcggccatactggaggccgtagtgccctcccgctccaaccccacccacgagaaggtcctggctatcgtgaacgcgctggtggagaacaaggccatccgtcccgatgaggccgggctggtatacaatgctcttttggagcgcgtggcccgttacaacagcagcaacgtgcagaccaacctggaccggatggtgaccgatgtgcgcgaggctgtgtctcagcgcgagcggttccagcgcgacgccaacttggggtcattggtagcgctaaacgctttccttagcacccagcccgccaacgtgccccgtggtcagcaagactatacaaactttttgagtgcattgagactcatggtatctgaggtgccccagagcgaggtgtaccagtccgggccagattacttcttccagaccagcagacagggcttgcagacagtgaacctgacccaggctttcaagaacctgaagggtctgtggggagtgcacgccccagtaggagatcgcgcgaccgtgtctagcttgctgactcccaactcccgcctgctgctgctgctggtatcccccttcactgacagcggtagcatcgaccgcaactcctacttgggctacctgcttaacctgtatcgcgaggctataggacagagccaggtggacgagcagacctatcaagaaatcacccaagtgagccgcgccctgggtcaggaagacacaggcggtttggaagccaccctgaacttcttactaaccaaccggtcgcagaagatccctcctcagtatgcgcttaccgctgaggaggagcggatcctaagatacgtgcaacagagcgttggactgtttttgatgcaggagggggcgacacctaccgccgcgctggatatgacagctcgaaacatggagcccagcatgtatgctagtaacaggcctttcattaacaaactgctggactacctgcacagggcggccgccatgaactctgattatttcaccaatgctattctgaacccacactggctgcccccacctggtttctacactggcgaatacgacatgcccgatcccaatgacgggttcctatgggacgatgtggacagtagcatattttccccgccgccaggttatacggtttggaagaaggaagggggcgatagaaggcactcttccgtatcgttgcccggaacggctggtgctgccgcggccgtgcccgaagctgcgagtcctttccctagcttgtccttttcactaaacagcgttcgcagcagtgaactggggagaataaaccgcccgcgcttgatgggcgaggatgagtacttgaatgactctttgctgaggccagagagggaaaagaacttccctaacaatggaatagagagcctggtggataagatgagtagatggaagacctatgcgcaggatcacagagacgagcccaggatcttgggggctacaagcagaccgagccgtagacgccagcgccacgacaggcagatgggtcttgtgtgggacgacgaggactctgccgatgacagcagcgtgttggacttgggtggaaaaggagttggcaacccgttcgctcatctgcgtccccgtttcggtcgcatgttgtaaaagtgaaagtaaaaataaaaaggcaactcaccaaggccatggcaaccgagcgtgcgttcgttcttttttttgttatctgtatctagtacgatgaggagacgagccgtgctaggcggagcggtggtgtatccggagggtcctcctccttcttacgagagcgtgatgcagcaacaggcggcgatgatacagcccccactggaggctcccttcgtaccccctcggtacctggcgcctacggaagggagaaatagcattcgttactcggagctgtcaccccagtacgataccaccaagttgtatctggcggacaacaagtcggcggacatcgcctccctgaactatcagaacgaccacagcaacttcctgaccacagtggtgcagaacaatgactttacccccacggaggctagcacccagaccattaactttgacgagcggtcgcggtggggcggtcagctgaagaccattatgcacaccaacatgcccaacgtgaacgagtacatgttcagcaacaagtttaaggcgagggtgatggtatctaggaaggctcctgaaggtgttacagtaaatgatcataaagatgatattttgaaatatgagtggtttgagttcactttaccagaaggtaacttctcagctaccatgaccatcgacctgatgaacaatgccatcattgacaactacctgaaaattggcagacagaatggagtgctggaaagtgacattggtgttaagtttgacactagaaacttcaggctcgggtgggaccccgaaactaagttgattatgccaggggtctacacttatgaggcattccatcctgacattgttttgttgcctggttgcggggtagattttactgaaagccgacttagcaacttgcttggcatcaggaagagacatccattccaggagggtttcaaaatcatgtatgaagatcttgaagggggtaatattcctgcccttttggatgtcactgcctatgaggaaagcaaaaaggataccactactgaaacaggcgaaaaggcggtggttaaaacaaccacagtggctgttgcagaggaaaccagtgaagatgataatataactagaggagatacttatataactgaaaaacaaaaacgtgaagctgcagctgcagaactattacttatgtctgaagttaaaaaagagttaaagatccaacctttagaaaaagacagcaagaatagaagctacaatgtcttggaagacaaaatcaacacagcctaccgcagctggtacctgtcctacaattatggtaaccctgagaaaggaataaggtcctggacactgctcaccacttcggatgtcacctgtggagccgagcaggtctactggtcgctccccgacatgatgcaagaccccatcaccttccgctcctcgagacaagtcaacaactacccagtagtgggtgcagagcttatgccggtcttctcaaagagtttctacaatgagcaagccgtgtactctcagcagctccgacagtccacctcgctcacgcacgtcttcaaccgcttccctgagaaccagatcctcatccgcccgccggcgcccacaattaccaccatcagtgaaaacgttcctgctctcacagatcacgggaccctgccgttacgcagcagtatccggggagtccagcgcgtgaccgttactgacgccagacgtcgcacctgtccctacgtttacaaggccctgggcatagtcgcgccgcgcgttctttcaagccgcactttctaaaaaaaaaaaaaaatgtccattctcatctcgcccagtaataataccggttggggactgcatgcgcccaccaagatgtacggaggcgcccgcaaacgctctacccagcaccccgtgcgcgttcgcggtcatttccgcgctccctggggcgccctcaagggccgtacccgcactcggaccacggtcgatgatgtgatcgaccaggtggttgccgatgctcgtaattatactcctactgcgcctacatctactgtggatgcagttattgacagtgtagtggcagacgctcgcgcctatgctcgccggaagagccgaaggaggcgcatcgccaggcgccacagggctactcccgctatgcgagctgcaaaagctattctgcggagggccaaacgtgtgggacgaagagccatgcttagagcggccagacgcgcggcttctggtgctagcagcggcaggtcccgcaggcgcgcggccacggcggcagcagcggccattgccaacatggcccaaccgcgaagaggcaatgtgtattgggtgcgcgatgccactaccggccagcgcgtgcccgtgcgcacccgcccccctcgcacttagaagatactgagcagtctccgatgttgtgtcccagcggcaagtatgtccaagcgcaaatacaaggaagagatgctccaggtcatcgcgcctgaaatctacggtccgccgatgaaggatgaaaaaaagccccgcaaaatcaagcgggttaaaaaggacaaaaaagaagaagatggcgatgatggactggtggagtttgtgcgcgagttcgcgccaagacggcgcgtgcagtggcgcggtcgaaaagtacgccaagtgcttagacccgggaccactgtggtctttacacctggcgagcgttccagcactacttttaaacggtcctatgatgaggtgtatggggatgacgatattattgagcaggcggcagaccgccttggcgagtttgcttatggcaagcgcacaagatccagtcccaaagaggaggcggtatctattcccttggatcatggaaatcccacccctagcctcaaaccagtcaccctgcagcaagtgctgcccgtacctgcgagcagaggcgtaaagcgcgagggtgaggacctatatcccaccatgcagctaatggtgcccaagcggcagagattagaagacgtactggagaaaatgaaagtggatgccgatatccagcctgaggtgaaagtgagacccatcaaggaagtggcgccaggtttgggagtacaaacctttgacatcaagattcccactgagtccatggaagtgcagaccgaacctgcaaaacccacagtcacctcaattgaggttcagacggaaccctggatgcccgcgcccgttgccgcccccagcaccactagaagatcacgtcgaaagtatggcccagcaagtctgctaatgcccaactatgctctgcacccatccatcattcccactccgggttacagaggcactcgctactatcgaagtcggagcaacacctcacgccgccgcaaactacctgcaagtcgcactcgccgtcgccgccgccgcaccactgccagcaaattaactcccgccgccctggtgcggagagtgtaccgcgatggtcgcgctgaacctctgacgctgccgcgcgcgcgctatcatccaagcatcaccacttaatgactgttgacgctgcctccttgcagatatggctctcacttgccgccttcgcgtccccattactggctaccgaggaagaaactcgcgccgtagaaggatgttggggcgagggatgcgccgccacagacgaaggcgcgctatcagcaagcgattagggggtggctttctgccagctcttatacccatcatcgccgcggcgatcggggcgataccaggcatagcttccgtggcggttcaggcctcgcagcgccactaacaatggaaaaatttataaataaaaaatagaatggactctgacgctcctggtcctgtgactatgtttttgtagagatggaagacatcaatttttcatccctggctccgcgacacggcacgaggccgtacatgggcacctggagcgacatcggcacgagccaactgaacgggggcgccttcaattggagcagtatctggagcgggcttaaaaattttggctcgaccataaaaacctatgggaacaaagcttggaacagcagcacagggcaggcccttagaaataagcttaaggagcagaacttccaacaaaaggtggtcgatggtatcgcctctggtattaacggcgtagtggatctagccaaccaggctgtgcagaaacagataaacagccgcctggacccgccgcccgcaactcctggtgaaatggaagtggaggaagagcttcctccgctggagaagcggggcgacaagcgaccgcgtcccgagctggaacagacgttggtgacgcgcgcagacgagcccccttcatacgaggaggcagtaaagctcggaatgcccactaccaggcctgtagctcacatggctaccggggtgatgaaaccttctcagtcgcatcggcctgccaccttggacttgcctcctccccctgcttctgcggcgcctattcccaaacctgtcgctaccagaaagcccaccgccgtacagcccgtcgccgtagccagaccgcgtcctgggggcacaccgcgcccgaaagcaaactggcagagtactctgaacagcatcgtgggtctgggcgtgcagagtgtaaagcgccgtcgctgctattaattaaatatggagtagcgcttaacttgcttgtctgtgtgtatgtatcatcaccatgccgccgcagcagaggagaaaggaagaggtcgcgcgccgaggctgagttgctttcaagatggccaccccatcgatgatgccccaatgggcatacatgcacatcgccggacaggatgcttcggagtacctgagtccgggtctggtgcagttcgcccgtgcaacagacacctacttcagtatggggaacaagtttagaaaccccacagtggcgcccacccacgatgtgaccaccgaccgtagccagcgactaatgctgcgcttcgtgcccgttgaccgggaagacaatacctactcttacaaagttcgctacacgctggctgtaggggacaacagagtactggatatggccagcacgttctttgacatccgcggcgtgctggaccggggccctagcttcaaaccctactccgggaccgcctacaacagcctggctcccaagggagcgcccaacacctgccagtggaaggattctgacagcaaaatgcatacctttggggtagctgccatgcccggtgttactgggaaaaagatagaagctgatgggctgcctattggaatagattcaacttctggaactgacacagtaatttatgctgataaaactttccaaccagaaccacaagttggaaatgccagttgggttgacgccaatggtacagaggaaaaatatggaggcagagctctgaaggacactacaaagatgaaaccctgctatggttctttcgccaagcctaccaacaaagaaggtggtcaggctaacttaaaagattcagaaaccgccgccaccactcctaactatgatatagatctggctttctttgacaacaaaaatattgctgctaactacgatccagatattgtaatgtacacagaaaatgttgacttgcagactccagatactcatattgtatacaaacctggaacagaggacaccagctctgaatccaatttgggtcagcaagccatgcctaacagacccaactacattggcttcagagacaattttattgggctcatgtactacaacagcactggcaatatgggggtgctggccggtcaggcctctcagctgaatgctgtggttgacttgcaagacagaaacactgaactgtcctaccagctcttgcttgactctctgggtgacagaacccggtatttcagtatgtggaatcaggcggtggacagctatgatcctgatgtgcgtattattgaaaaccatggtgtggaggacgaattgccaaactattgctttccgttgaatggtgtgggatttacagacacttaccaaggtgttaaagttaaaacagatgcagttgctggaaccagtggaacacagtgggacaaagatgacaccacagttagtactgctaatgaaatccatggaggcaatccttttgccatggaaatcaacatccaagccaatctatggcgaagtttcctttattccaatgtggctttgtatctcccagactcgtataaatacaccccgtccaatgtcactctcccagaaaacaaaaacacctacgactacatgaacgggcgggtggtgccgccatctctagtagacacctatgtgaacattggtgccaggtggtctctggatgccatggacaatgtcaacccattcaaccaccaccgtaacgctggcttgcgttaccgatccatgcttctgggtaacggacgttatgtgcctttccacatacaagtgcctcaaaaattcttcgctgttaaaaacctgctgcttctcccaggctcctacacttatgagtggaactttaggaaggatgtaaacatggttctacagagttcccttggtaacgacctacgggtagatggcgccagcatcagtttcacgagcatcaatctttatgctacttttttccccatggctcacaacaccgcttccacccttgaagccatgctgcggaatgacaccaatgatcagtcattcaacgactacctatctgcagctaacatgctctaccccatacctgccaacgcaaccaatattcccatttccattccttctcgcaactgggcggctttcagaggctggtcatttaccagactgaaaaccaaagaaactccctctttggggtctggatttgacccatactttgtctattccggttctattccctacctggatggtaccttctatctaaatcacacttttaagaaggtttccatcatgtttgactcttcagtgagctggcctggaaatgacaggttactatctcctaacgaatttgaaataaagcgcactgtggatggcgaaggctacaacgtagcccaatgcaacatgaccaaagactggttcttggtacagatgctcgccaactacaacattggctaccagggcttttacatccctgagggatacaaggatcgcatgtactcctttttcagaaacttccagcctatgagcaggcaggtggttgatgaggttaattacactgactacaaagccgtcaccttaccatatcaacacaacaactctggctttgtaggataccttgcgcctactatgagacaaggggaaccttacccagccaattatccatacccgctcatcggaactactgccgttaagagtgttacccaaaaaaagttcctgtgcgacaggaccatgtggcgcataccgttctccagcaacttcatgtccatgggggcccttacagacctgggacaaaacctgctctatgccaactcggcccatgcactggacatgacttttgaggtggatcccatggatgagcccaccctgctttatcttcttttcgaagtcttcgacgtggtcagagtgcaccagccacaccgcggcgtcatcgaggccgtctacctgcgcacaccgttctcggccggcaacgccaccacataagaagcctcttgcttcttgcaagcagcagctgcagccatgtcatgcgggtccggaaacggctccagcgagcaagagctcaaagccatcgtccgagacctgggttgcggtccctatttcctgggaacctttgacaagcgtttcccggggttcatggcccccgacaagctcgcctgcgccatagtcaacactgccggacgcgagacggggggagagcactggctggcttttggttggaacccgcgctccaacacctgctacctttttgatccttttgggttctcggatgagcgactcaaacagatttaccagtttgagtacgaggggctcctgcgccgcagtgcccttgctaccaaagaccgctgcatcaccctggaaaagtccacccagagcgtgcagggcccacgctcagccgcctgtggacttttttgctgtatgttccttcatgcctttgtgcactggcccgaccgtcccatgaacggaaaccccaccatgaagttgctgactggggtgcccaacagcatgctccaatctccccaagtccagcccaccctgcgccgcaaccaggaggcactataccgcttcctaaacacccactcatcttactttcgttctcaccgcgcacgcatcgaaagggccaccgcgtttgaccgtatggatatgcaataagtcatgtaaaaccgtgttcaataaaaagcactttatttttacatgcactaaggctctggttttttgctcattcgttttcatcattcactcagaaatcaaatgggttctggcgggagtcatagtggcccgcgggcagggatacgttgcggaactgtaacctgttctgccacttgaactcggggatcaccagcttgggaactggaatctcgggaaaggtgtcttgccacaactttctggtcagttgcagggcgccaagcaggtcaggagcagagatcttgaaatcacagttggggccggcattctggacacgggagttgcggtacactgggttgcaacactggaacaccatcaaggctgggtgtctcacgcttgccagcacggtcgggtcactgatggtagtcacatccaagtcttcagcattggccatcccaaagggggtcatcttacaggtctgcctgcccatcacgggagcgcagcctggcttgtggttgcaatcgcaatgaatgggaatcagcatcatcctggcttggtcgggggttatccctggatatacggccttcatgaaggcttcgtactgcttgaaagcttcctgagccttacttccctcggtgtagaacattccacaggacttgctggaaaattggttagtagcacagttggcatcatttacacagcagcgggcatcgttgttggccaactgaaccacatttctgccccagcggttctgggtgatcttggctctgtctgggttctccttcatagcgcgctgcccgttctcgctcgccacatccatctcgataatgtggtccttctggatcatgatagtgccatgcaggcatttcaccttgccttcgtaatcggtgcatccatgagcccacagagcgcacccggtgcactcccaattattgtgggcgatctcagaataagaatgcaccaatccctgcatgaatcttcccatcatcgctgtcagggtcttcatgctactaaatgtcagcggaatgccacggtgctcctcgttcacatactggtggcagatacgcttgtactgctcgtgctgctctggcatcagcttgaaagaggttctcaggtcattatccagcctatacctctccattagcacagccatcacttccatgcccttctcccaggcagataccaggggcaagctcaaaggattcctaacagcaatagaagtagctcctttagctatagggtcattcttgtcgatcttctcaacacttctcttgccatccttctcaatgatgcgcaccggggggtagctgaagcccacggccaccaactgagcctgttctctttcttcttcgctgtcctggctgatgtcttgcagagggacatgcttggtcttcctgggcttcttcttgggagggatcgggggaggactgttgctccgttccggagacagggatgaccgcgaagtttcgcttaccagtaccacctggctctcgatagaagaatcggaccccacgcgacggtaggtgttcctcttcgggggcagaggtggaggcgactgagatgggctgcggtctggccttggaggcggatggctggcagagcccattccgcgttcgggggtgtgctcccgttggcggtcgcttgactgatttcctccgcggctggccattgtgttctcctaggcagagaaacaacagacatggaaactcagccatcactgccaacatcgctgcaagcgccatcacacctcgcccccagcagcgacgaggaggagagcttaaccaccccaccacccagtcccgctaccaccacctctaccctcgatgatgaggaggaggtcgacgcagcccaggagatgcaggcgcaggataatgtgaaagcggaagagattgaggcagatgtcgagcaggacccgggctatgtgacaccggcggagcacgaggaggagctgaaacgttttctagacagagaggatgacgaccgcccagagcatcaagcagatggcgatcaccaggaggctggcctcggggatcatgttgccgactacctctccgggcgtgggggggaggacgtgctcctcaaacatctagcaaggcagtcgctcatagttaaagacgcactactcaacctcaccgaagtgcccatcagtgtggaagagcttagccgcgcctacgagctgaacctcttttcgcctcagataccccccaagcggcagccaaacggcacctgcgaggccaaccctcgactcaacttctatccagcttttactgtccccgaagtgctggccacctaccacatcttttttaagaaccaaaagattccagtctcctgccgcgccaaccgcacccgcgcagatgcccttctcaacttgggtccgggagctcgcttacctgatatagcttccttggaagaggttccaaagatctttgagggtctgggaagtgatgagactcgggccgcaaatgctctgcaacagggagagaatggcatggatgaacatcacagcgctctagtggaactggagggtgacaatgcccggcttgcagtgctcaagcgcagtatcgtggtcacccattttgcctaccccgctgttaacctgccgcccaaagtcatgagcgctgtcatggaccatctgctcatcaaacgagcaagtccactttcagaaaaccagaacatgcaggatccagacgcctcggacgagggcaagccggtagtcagtgacgagcagctatctcgctggctgggtaccaactccccccgagatttggaagaaagacgcaagcttatgatggctgtagtgctagtaactgttgagttggagtgtctgcgccgcttttttaccgaccccgagaccctgcgcaagctagaggagaacctgcactacaccttcagacatggcttcgtgcggcaggcatgcaagatctccaacgtggagctcaccaacctggtttcatacatgggcattttgcatgagaaccggctagggcagagcgttctgcacaccaccctgaagggggaggcccgccgcgactacatccgagactgtgtctacctctacctctgccatacctggcagactggtatgggtgtgtggcaacagtgtttggaagagcagaaccttaaagagctggacaagctcttgcagagatccctcaaagccctgtggacaggttttgacgagcgcaccgtcgcctcggacttggcggacatcatcttccccgagcgtcttagggttactctgcgaaacggcctgccagacttcatgagccagagcatgcttaacaactttcgctctttcatcctggaacgctccggtatcctgcctgccacctgctgtgcgctgccctccgactttgtgcctctcacctaccgcgagtgcccaccgccgctatggagccactgctacctattccgcctggccaactacctctcctaccactcggatgtgatagaggatgtgagcggagacggcctgctggaatgccactgccgatgcaatttatgcacaccccaccgctccctcgcctgcaacccccagttgctaagcgagacccagatcatcggcaccttcgagttgcagggtcccaacagtgaaggcgaggggtcttctccggggcagagtctgaaactgacaccggggctgtggacctccgcctacctgcgcaagtttcatcccgaggactatcatccctatgagatcaggttctatgaggaccagtcacatcctcccaaagtcgagctctcagcctgcgtcatcacccagggggcaattctggcccaattgcaagccatccaaaaatcccgccaagaatttctgctgaaaaagggaagcggggtctaccttgacccccagaccggtgaggagctcaacacaaggttcccccaggatgtcccatcgccgaggaagcaagaagctgaaggtgcagctgtcacccccagaggatatggaggaagactgggacagtcaggcagaggaggagatggaagattgggacagccaggcagaggaggtggacagcctggaggaagacagtttggaggaggaagacgaggaggcagaggaggtggaagaagcaaccgccgccaaacagttgtcatcggcggcggagacaagcaagtccccagacagcagcacggctaccatctccgctccgggtcggggggcccagcggcggcccaacagtagatgggacgagaccgggcgattcccaaacccgaccaccgcttccaagaccggtaagaaggagcgacagggatacaagtcctggcgtggacataaaaacgctatcatctcctgcttgcatgaatgcgggggcaacatatccttcacccggcgatacctgcttttccaccacggtgtgaacttcccccgcaatatcttgcattactaccgtcacctccacagcccctactgcagtcagcaagtcccggcaaccccgacagaaaaagacagcagcgacaacggtgaccagaaaaccagcagttagaaaatccacaacaagtgcagcaggaggaggactgaggatcacagcgaacgagccagcgcagaccagagagctgaggaaccggatctttccaaccctctatgccatcttccagcagagtcgggggcaagagcaggaattaaaagtaaaaaaccgatctctgcgctcgctcaccagaagttgtttgtatcacaagagcgaagaccaacttcagcgcactctcgaggacgccgaggctctcttcaacaagtactgcgcgctgactcttaaagagtagcccttgcccgcgctcattcgaaaacggcgggaatcacgtcacccttggcagctgtcctttgccctcgtcatgagtaaagagattcccacgccttacatgtggagctatcagccccaaatggggttggcagcaggtgcttcccaggactactccacccgcatgaattggcttagcgccgggccctcaatgatatcacgggttaatgatatacgagcttatcgaaaccagttactcctagaacagtcagctctcaccaccacaccccgccaacaccttaatccccgaaattggcccgccgccctggtgtaccaggaaaatcccgctcccaccaccgtactacttcctcgagacgcccaggccgaagttcagatgactaacgcaggtgtacagctggcgggcggttccgccctatgtcgtcaccgacctcaacagagtataaaacgcctggtgatcagaggccgaggtatccagctcaacgacgagtcggttagctcttcgcttggtctgcgaccagacggagtcttccagatcgccggctgtgggagatcttccttcactcctcgtcaggctgtgctgactttggagagttcgtcctcgcagccccgctcgggcggcatcggaactctccagtttgtggaggagtttactccctctgtctacttcaaccccttctccggctctcctggccagtacccggacgagttcataccgaacttcgacgcaatcagcgagtcagtggatggctatgattgatgtctaatggtggcgcggctgagctagctcgactgcgacacctagaccactgccgccgctttcgctgtttcgcccgggaactcaccgagttcatctacttcgaactctccgaggagcaccctcagggtccggcccacggagtgcggattaccatcgaagggggaatagactctcgcctgcatcgcatcttctcccagcggcccgtgctgattgagcgcgaccagggaaatacaaccatctccatctactgcatttgtaaccaccccggattgcatgaaagcctttgctgtcttgtttgtgctgagtttaataaaaactgagttaagaccctcctacggactaccgcttcttcaatcaggactttacaacaccaaccagatcttccagaagacccagacccttcctcctctgatccaggactctaactctaccttaccagcaccctccactactaaccttcccgaaactaacaagcttggatctcatctgcaacaccgcctttcacgaagccttctttctgccaatactaccactcccaaaaccggaggtgagctccgcggtcttcctactgacgacccctgggtggtagcgggttttgtaacgttaggagtagttgcgggtgggcttgtgctaatcctttgctacctatacacaccttgctgtgcatatttagtcatattgtgctgttggtttaagaaatgggggccatactagtcgtgcttgctttactttcgcttttgggtctgggctctgctaatctcaatcctcttgatcacgatccatgtctagacttcgacccagaaaactgcacacttacttttgcacccgacacaagccgtctctgtggagttcttattaagtgcggatgggactgcaggtccgttgaaattacacataataacaaaacatggaacaataccttatccaccacatgggagccaggagttcccgagtggtatactgtctctgtccgaggtcctgacggttccattcgcattagtaacaacactttcattttttctgaaatgtgcgatctggccatgtttatgagcaaacagtatgacctatggcctcctagcaaagagaacattgtggcattttccattgcttattgcttggtaacatgcatcatcactgctatcatttgtgtgtgcatacacttgcttatagttattcgccctagacaaagcaatgaggaaaaagagaaaatgccttaacctttttcctcataccttttctttacagcatggcttctgttacagctctaattattgccagcattgtcactgtcgctcacgggcaaacaattgtccatattaccttaggacataatcacactcttgtagggcccccaattacttcagaggttatttggaccaaacttggaagtgttgattattttgatataatttgcaacaaaactaaaccaatatttgtaatctgcaacagacaaaatctcacgttaattaatgtcagcaaaatttataacggttactattatggttatgatagatccagtagtcaatataaaaattacttagttcgcataactcaacccaaatcaacagtgccaactatgacaataattaaaatggctaataaagcattagaaaattttacattaccaacaacgcccaatgaaaaaaacattccaaattcaatgattgcaattattgcggcggtggcattgggaatggcactaataataatatgcatgttcctatatgcttgttgctataaaaagtttaaacataaacaggatccactactaaattttaacatttaattttttatacagatgatttccactacaatttttatcattactagccttgcagctgtaacttatggccgttcacacctaactgtacctgttggctcaacatgtacactacaaggaccccaagaaggccatgtcacttggtggagaatatatgataatggagggttcgctagaccatgtgatcagcctggtacaaaattttcatgcaacggaagagacttgaccattattaacataacattaaatgagcaaggcttctattatggaaccaactataaaaatagtttagattacaacattattgtagtgccagccaccacttctgctccccgcaaatccactttctctagcagcagtgccaaagcaagcacaattcctaaaacagcttctgctatgttaaagcttcgaaaaatcgctttaagtaattccacagccgctcccaatacaattcctaaatcaacaattggcatcattactgccgtggtagtgggattaataattatatttttgtgcataatgtactacgcctgctgctatagaaaacatgaacaaaaaggtgatgcattactaaattttgatatttaattttttatagaattatgatattgtttcaatcaaataccactaacactatcaatgtgcagactactttaaatcatgacatggaaaaccacactacctcctatgcatacacaaacattcagcctaaatacgctatgcaactagaaatcaccatactaattgtaattggaattcttatactatctgttattctttattttatattctgccgtcaaatacccaatgttcatagaaattctaaaagacgacccatctattctcctatgattagtcgtccccatatggctctgaatgaaatctaagatctttttttttctcttacagtatggtgaacatcaatcatgattcctagaaatttcttcttcaccatactcatctgtgctttcaatgtctgtgctactttcacagcagtagccactgcaagcccagactgtataggaccatttgcttcctatgcactttttgccttcgttacttgcatctgcgtgtgtagcatagtctgcctggttattaattttttccaactggtagactggatctttgtgcgaattgcctacctacgtcaccatcccgaataccgcaatcaaaatgttgcggcactttttaggcttatttaaaaccatgcaggctatgctgccagtcattttaattctgctcctaccctgcattgccctagcttccaccgccactcgcgctacacctgaacaacttagaaaatgcaaatttcaacaaccatggtcatttcttgattgctaccatgaaaaatctgattttcccacatactggatagtgattgttggaataattaacatactttcatgtacctttttctcaatcacaatataccccacatttaattttgggtggaattctcccaatgcactgggttacccacaagaaccacatgaacatatcccactacaacacatacaacaaccactagcactggtagagtatgaaaatgagccacaaccttcactgcctcctgccattagttacttcaacctaaccggcggagatgactgaaatactcaccacctccaattccgccgaggatctgcttgatatggacggccgcgcctcagaacagcgactcgcccaactacgcatacgccagcagcaggaacgtgccgccaaggagctcagggatgctattgaaattcaccaatgcaaaaaaggcatattttgtttggtaaaacaagccaagatatcctacgagattaccaatactgaccatcgcctctcatacgagctcggaccgcagcgacaaaaattcacttgtatggtgggaatcaaccccataatcatcacccagcaagctggagataccaagggttgcatccactgttcctgcagttccgccgagtgcatctacaccctgctgaagaccctctgcggccttcgagacctcctacccatgaactaatcaacccagcccctcacttaccaattacataaagccaattaataaaaacacttacttgaaatcagaaataaggtttctgtctacgttgtttccaagcagcacctcacttccttcttcccaactctggtactctaagcctcggcgggtggcatacttcctccacactttgaaagggatgtcaaattttagttcctcttctttgcccacaatcttcatttctttatccccagatggccaaacgagctcggctaagcagctccttcaatccggtctacccctatgaagatgaaagcagctcacaacacccctttataaaccctggtttcatttcctcaaatggttttgcacaaagcccagatggagttctaactcttaaatgtgttaatccactcactaccgccagcggacccctccaacttaaagttggaagcagtcttacagtagatactatcgatgggtctttggaggaaaatataactgccgcagcgccactcactaaaactaaccactccataggtttattaataggatctggcttgcaaacaaaggatgataaactttgtttatcgctgggagatgggttggtaacaaaggatgataaactatgtttatcgctgggagatgggttaataacaaaaaatgatgtactatgtgccaaactaggacatggccttgtgtttgactcttccaatgctatcaccatagaaaacaacaccttgtggacaggcgcaaaaccaagcgccaactgtgtaattaaagagggagaagattccccagactgtaagctcactttagttctagtgaagaatggaggactgataaatggatacataacattaatgggagcctcagaatatactaacaccttgtttaaaaacaatcaagttacaatcgatgtaaacctcgcatttgataatactggccaaattattacttacctatcatcccttaaaagtaacctgaactttaaagacaaccaaaacatggctactggaaccataaccagtgccaaaggcttcatgcccagcaccaccgcctatccatttataacatacgccactgagaccctaaatgaagattacatttatggagagtgttactacaaatctaccaatggaactctctttccactaaaagttactgtcacactaaacagacgtatgttagcttctggaatggcctatgctatgaatttttcatggtctctaaatgcagaggaagccccggaaactaccgaagtcactctcattacctcccccttctttttttcttatatcagagaagatgactgacaacaaaaaaaataaagatcaacttttttattgaaaatcagtttacaagattcgagtagttattttgcccccctcttcccattttatagaatacacaattctctccccacgcacagctttgaacatttgaattccattagagatagacatagttttagattccacattccacacagtttcagagcgggccaatcttggatcagtgatagatataaatccatcggaacagtctttcaaggtggtttcacagtccaactgctgcggctgcggctccggggtttggattagggtcatctggaagaagaacgatgggagtcataatccgagaacgggatcgggcggttgtgtcttaaacctcgaagcaatcgctgtctgcgccgctccgtgcgactgctgctgatgggatcaggatccacagtctctcgaagcataattttaatagccctcaacattaacatcctggtgcgatgggcacaacaacgcattctaatttcgcttagctcactgcagtaggtacaacacattaccacaatgttgtttaacaggccataattaaaggtgctccagccaaaactcatctcagggataatcatacccgcgtgaccatcgtaccaaatcttaatgtaaattagatgacgccccctccagaacacactgcccacatacataatttccttgggcatatgcatgttcacaatttctctgtaccatggacagcgctggttaatcatacagcccctaataaccttccggaaccacatagctagcactgctcccccagcaatacattgaagagaacccggctgtttacagtgacaatggagaacccacttctctcgcccatggatcacttgagaattaaatatatctatagtggcacaacacaaacataaatgcatgcatcttttcataaccctcaactcttcgggggttaaaaacatatcccagggaataggaagctcttgcaaaacagtaaagctggcagaacaaggaagaccacgaacacaacttacactatgcatagtcatagtatcacaatctggcaacagcgggtggtcttcagtcatagaagctcgggtttcattttcctcacatcgtggtaactgggctctggtgtaagggtgatgtctggcgcatgatgtcgagcgtgcgcgcaaccttgtcataatggagttgcttcctgacattctcgtattttgtatagcaaaatgcggccctggcacaacacacttttcttcgtcttctatcctgccgcttagtgtgttccgtctgataattcaagtacagccacactcttaagttggtcaaaagaatgctggcttcagttgtaatcaaaactccatcatatttaattgttctaaggaaatcatccacggtagcatatgcaaatcccaaccaagcaatgcaactggattgcgtttcaagcagcagaggagagggaagagacggaagaatcatgttaatttttattccaaacgatctcgcagtacttcaaattgtagatcgcgcagatggcatctatcgcccccactgtgttggtgaaaaagcacagctaaatcaaaagaaatgcgattttcaaggtgctcaacggtggcttccaacaaagcctccacgcgcacatccaaaaacaaaagaataccaaaagaaggagcattttctaactcctcaaacatcatattacattcctgcaccattcccagataattttcagctttccagccttgaattattcgtgtcagttcttgtggtaaatccaaaccacacattacaaacaggtcccggagggcgccctccaccaccattcttaaacacaccctcataatgacaaaatatcttgctcctgtgtcacctgtagcaaattaagaatggcatcatcaattgacatgcccttggctctaagttcttctctaagttctagttgtaaatactctctcatattatcaccaaactgcttagccagaagccccccgggaacaatagcaggggacgctacagtgcagtacaagcgcagacctccccaattggctccagcaaaaacaagattagaataagcatactgggaaccaccagtaatatcatcaaagttgctggaaatataatcaggcagagtttcttgtaaaaattgaataaaagaaaaattttccaaagaaacattcaaaacctctgggatgcaaatgcaataggttaccgcgctgcgctccaacattgttagttttgaattagtctgtaaaataaaagaaacaagcgtcatatcatagtagcctgtcgaacaggtggataaatcagtctttccatcacaagacaagccacagggtctccagcttgaccctcgtaaaacctgtcatcgtgattaaacaacagcaccgaaagttcctcgcggtggccagcatgaataattcttgatgaagcatataatccagacatgttagcatcagttaaagagaaaaaacagccaacatagcctctgggtataattatgcttaatcttaagtatagcaaagccacccctcgcggatacaaagtaaaaggcacaggagaataaaaaatataattatttctctgctgctgttcaggcaacgtcgcccccggtccctctaaatacacatacaaagcctcatcagccatggcttaccagacaaagtacagcgggcgcacaaagcacaagctctaaagaagctctaaagacactctccaacctctccacaatatatacacaagccctaaactgacgtaatgggagtaaagtgtaaaaaatcccgccaagcccaacacacaccccgaaactgcgtcagcagggaaaagtacagtttcacttccgcaaacccaacaagcgtaacttcctctttctcacggtacgtcacatccgattaacttgcaacgtcattttcccacggccgcaccgccccttttagccgttcaccccgcagccaatcaccacacagcgcgcacttttttaaattacctcatttacatgttggcaccattccatctataaggtatattatagataatggcgatcgc

SEQ ID NO: 7 - DNA, 35590 bp, Adenovirus B21
  MISC_FEATURE (1)..(35590): Complete Genome
ctgcaggttaattaaggaagggcgaattctgcagatatccatcacactggcggccgctcgagcatgcatctagagggcccaattcgccctatagtgagtcgtattacaattcactggcctattatataatataccttatagatggaatggtgccaatatgcaaatgaggtaatttaaaaaagtgcgcgctgtgtggtgattggctgcggggttaacggctaaaaggggcgggcaatgctgggaggtgacgtaacttatgtaggaggagttatgttgcaagttatcgcggtaaaggtgacgtaaaacgaggtgtggtttggacacggaagtagacagttttcccacgcttactgacaggatatgaggtagttttgggcggatgcaagtgaaaattctccattttcgcgcgaaaactgaatgaggaagtgaatttctgagtcatttcgcggttatgacagggtggagtatttgccgagggccgagtagactttgaccgtttacgtggaggtttcgattaccgtgtttttcacctaaatttccgcgtacggtgtcaaagtcctgtgtttttacgtaggtgtcagctgatcactagggtatttaaacctgtcgagttccgtcaagaggccactcttgagtgccagcgagaagagttttctcctccgcgctgcgagtcagttttgcgctttgaaaatgagacacctgcgattcctgccacaggagattatctccagcgagaccgggatcgaaatactggagtttgtggtaaataccctgatgggagatgacccggaaccgccagtgcagcctttcgatccacctacgctgcacgatctgtatgatttagaggtagacgggcctgatgatcccaatgaggaagctgtaaatgggttttttactgattctatgctgctagctgccgatgaaggattggacataaaccctcctcctgggacccttgataccccaggggtggttgtggaaagcggcagaggtgggaaaaaattgcctgatctgggagcagctgaaatggacttgcgttgttatgaagagggttttcctccgagtgatgatgaagatggggaaactgaacagtccatccataccgcagtgaatgagggagtaaaagctgccagcgatgtttttaagttggactgtccggagctgcctggacatggctgtaagtcttgtgaatttcacaggaataacactggaatgaaagaactattgtgctcgctttgctatatgagaatgcactgccactttatttacagtaagtgtatttaagtgaaatttaaaggaatagtgtagctgtttaataactgttgaatggtagatttatgtttttacttgcgattttttgtaggtcctgtgtctgatgatgaggcgccttctcctgattcaactacctcacctcctgaaattcaggcgcccgtacctgcaaacgtatgcaagcccattcctgtgaagcctaagtgtgggaaacgccctgctgtggataagcttgaggacttgttggagggtggggatggacctttggaccttagtacccggaaactgccaagacaatgagtgccctgcagctgtgtttatttaatgtgacgtcatgtaataaaattatgtcagctgctgagtgttttattgcttcttgggtggggacttggatatataagtaggagcagatctgtgtggttagctcatagcaacctgctgccatccatggaggtttgggctatcttggaagacctgagacagactaggctactgctagaaaacgcctcggacggagtctctggcttttggagattctggttcggtggtgatctagctaggctagtgtttaggataaaacaggactacagggaagaatttgaaaagttattggacgacagtccaggactttttgaagctcttaacttgggccaccaggctcattttaaggagaaggttttatcagttttagatttttctactcctggtagaactgctgctgctgtagcttttcttacttttatattggataaatggatccgccaaacccacttcagcaagggatacgttttggatttcatagcagcagctttgtggagaacatggaaggctcgcaggatgaggacaatcttagattactggccagtgcagcctctgggagtagcagggatactgagacacccaccggccatgccagcggttctggaggaggagcagcaggaggacaatccgagagccggcctggaccctccggtggaggagtagctgacctgtttcctgaactgcgacgggtgcttactaggtctacgtccagtggacaggacaggggcattaagagggagaggaatcctagtgggaataattcaagaaccgagttggctttaagtttaatgagccgtaggcgtcctgaaactgtttggtggcatgaggttcagagcgaaggcagggatgaagtttcaatattgcaggagaaatattcactagaacaacttaagacctgttggttggaacctgaggatgattgggaggtggccattaggaattatgctaagatatctctgaggcctgataaacagtatagaattactaagaagattaatattagaaatgcatgctacatatcagggaatggggcagaggttataatagatacccaagataaagcagcttttagatgttgtatgatgggtatgtggccaggggttgtcggcatggaagcagtaacatttatgaatattaggtttaaaggggatgggtataatggcattgtatttatggctaacactaagctgattctacatggttgtagcttttttgggtttaataatacttgtgtagaagcttgggggcaagttggtgtgaggggttgtagtttttatgcatgctggattgcaacatcaggtagggtcaagagtcagttgtctgtgaagaaatgcatgtttgagagatgtaatcttggcatactgaatgaaggtgaagcaagggtccgccactgcgcagctacagaaactggctgcttcattctaataaagggaaatgccagtgtgaagcataatatgatctgtggacattcgaatgagaggccttatcagatgctgacctgcgctggtggacattgcaatattcttgctaccgtgcatatcgtttcccatgcacgcaagaaatggcctgtatttgaacataatgtgattaccaagtgcaccatgcacataggtggtcgcaggggaatgtttatgccttaccagtgtaacatgaatcatgtgaaggtgatgttggaaccagatgccttttccagagtgagcttaacaggaatctttgatatgaatattcaactatggaagatcctgagatatgatgacactaaaccgagggtgcgcgcatgcgaatgcggaggcaagcatgctagattccagccggtgtgcgtggatgtgactgaagacctgagacccgatcatttggtgcttgcctgcactggagcggagttcggttctagtggtgaagaaactgactaaagtgagtagtggggcaatatgtggatggggactttcaggttggtaaggtggacagattgggtaaattttgttaatttctgtcttgcagctgccatgagtggaagcgcttcttttgaggggggagtatttagcccttatctgacgggcaggctcccatcatgggcaggagttcgtcagaatgtcatgggatccactgtggatgggagacccgtccagcccgccaattcctcaacgctgacctatgccactttgagttcgtcatcattggatgcagctgcagccgccgccgctactgctgccgccaacaccatccttggaatgggctattacggaagcatcgttgccaattccagttcctctaataacccttcaaccctggctgaggacaagctgcttgttctcttggctcagctcgaggccttaacccaacgcttaggcgaactgtctaagcaggtggcccagttgcgtgagcaaactgagtctgctgttgccacagcaaagtctaaataaagatctcaaatcaataaataaagaaatacttgttataaaaacaaatgaatgtttatttgatttttcgcgcgcggtatgccctggaccatcggtctcgatcattgagaactcggtggatcttttccagtaccctgtaaaggtgggattgaatgtttagatacatgggcattagtccgtctcgggggtggagatagctccattgaagagcctcttgctccggggtagtgttataaatcacccagtcatagcaaggtcggagtgcatggtgttgcacaatatcttttaggagcagactaattgcaacggggaggcccttagtgtaggtgtttacaaatctgttgagctgggacgggtgcatcctgggtgaaattatatgcattttggactggatcttgaggttggcaatgttgccgcctagatcccgtctcggattcatattgtgcagaaccaccaagacagtgtatccggtgcacttgggaaatttatcatgcagcttagagggaaaagcatgaaaaaatttggagacgcctttgtgaccccccagattctccatgcactcatccataatgatagcgatggggccgtgggcagcggcacgggcgaacacgttccgggggtctgaaacatcatagttatgctcctgagtcaggtcatcataagccattttaataaactttgggcggagggtgccagattgggggatgaaagttccctctggcccgggagcatagtttccctcacatatttgcatttcccaggctttcagttccgagggggggatcatgtccacctgcggggctataaaaaataccgtttctggagccggggtgattaactgggatgagagcaaattcctaagcagctgagacttgccgcacccagtgggaccgtaaatgaccccaattacgggttgcagatggtagtttagggagcgacagctgccgtcctcccggagcaggggggccacttcgttcatcatttcccttacatggatattttcccgcaccaagtccgttaggaggcgctctcccccaagggatagaagctcctggagcgaggagaagtttttcagcggcttcagcccgtcagccatgggcattttggaaagagtctgttgcaagagctcgagccggtcccagagctcggtgatgtgctctatggcatctcgatccaacagacctcctcgtttcgcgggttgggacggctcctggagtagggaatcagacgatgggcgtccagcgctgctagggtccgatccttccatggtcgcagcgtccgagtcagggttgtttccgtcacggtgaaggggtgcgcgcctggttgggcgcttgcgagggtgcgcttcagactcatcctgctggtcgagaaccgctgccgatcggcgccctgcaggtcggccaggtagcagtttaccatgagttcgtagttgagcgcctcggccgcgtggcctttggcacggagcttacctttggaagttttatggcaggcggggcagtagatacatttgagggcatacagcttgggcgcgaggaaaatggattcgggggagtatgcatccgcaccgcaggaggcgcagacggtttcgcactccacgagccaggtcagatccggctcatcggggtcaaaaacaagttttccgccatgttttttgatgcgtttcttacctttggtttccatgagttcgtgtccccgctgggtgacaaagaggctgtccgtgtccccgtagaccgactttatgggcctgtcctcgagcggagtgcctcggtcctcttcgtagaggaacccagcccactctgatacaaaagcgcgtgtccaggccagcacaaaggaggccacgtgggaggggtagcggtcgttgtcaaccagtgggtccaccttctctacggtatgtaaacacatgtccccctcctccacatccaagaatgtgattggcttgtaagtgtaggccacgtgaccaggggtccccgccgggggggtataaaagggggcgggcctctgttcgtcctcactgtcttcaggatcgctgtccaggagcgccagctgttggggtaggtattccctctcgaaggcgggcatgacctctgcactcaggttgtcagtttctaggaacgaggaggatttgatattgacagtaccagcagagacgcctttcataagactctcgtccatctggtcagaaaacacaatcttcttgttgtccagcttggtggcaaatgatccataaagggcattggacagaagcttggcgatggagcgcatggtttggttcttttccttgtccgcgcgctccttggcggcgatgttaagctggacgtactcgcgcgccacacatttccattcagggaagatggttgtcagttcatccggaactattctgactcgccatcccctattgtgcagggttatcagatccacactggtggccacctcgcctcggaggggctcattggtccagcagagtcgacctccttttcttgaacagaaaggtgggagggggtctagcatgaactcatcaggggggtccgcatctatggtaaatattcccggtagcaaatctttgtcaaaatagctgatggtggcgggatcatccaaggtcatctgccattctcgaactgccagcgcgcgctcataggggttaagaggggtgccccagggcatggggtgggtgagcgcggaggcatacatgccacagatatcgtagacatagaggggctcttcgaggatgccgatgtaagtgggataacagcgcccccctctgatgcttgctcgcacatagtcatagagttcatgtgagggggcgagaagacccgggcccagattggtgcggttgggtttttccgccctgtaaacgatctggcgaaagatggcatgggaattggaagagatagtaggtctctggaatatgttaaaatgggcatgaggtaggcctacagagtcccttatgaagtgggcatatgactcttgcagcttggctaccagctcggcggtgacgagtacatccagggcacagtagtcgagagtttcctggatgatgtcataacgcggttggcttttcttttcccacagctcgcggttgagaaggtattcttcgcgatccttccagtactcttcgaggggaaacccgtctttttctgcacggtaagagcccaacatgtagaactgattgactgccttgtagggacagcatcccttctccactggaagagagtatgcttgggctgcattgcgcagcgaggtatgagtgagggcaaaagtgtccctgaccatgactttgaggaattgatacttgaagtcaatgtcatcacaggccccctgttcccagagttggaagtccacccgcttcttgtaggcggggttgggcaaagcgaaagtaacatcattgaagaggatcttgccggccctgggcatgaaatttcgggtgattttgaaaggctgagggacctctgctcggttattgataacctgagcggccaagacgatctcatcaaagccattgatgttgtgccccactatgtacagttctaagaatcgaggggtgcccctgacatgaggcagcttcttgagttcttcaaaagtgagatctgtagggtcagtgagagcatagtgttcgagggcccattcgtgcacgtgagggttcgctttgaggaaggaggaccagaggtccactgccagtgctgtttgtaactggtcccggtactgacgaaaatgctgcccgactgccatcttttctggggtgacgcaatagaaggtttgggggtcctgccgccagcgatcccacttgagtttcatggcgaggtcataggcgatgttgacgagccgctggtctccagagagtttcatgaccagcatgaaggggattagctgcttgccaaaggaccccatccaggtgtaggtttccacatcgtaggtgaggaagagcctttctgtgcgaggatgagagccaatcgggaagaactggatctcctgccaccagttggaggaatggctgttgatgtgatggaagtagaactccctgcgacgcgccgagcattcatgcttgtgcttgtacagacggccgcagtactcgcagcgattcacgggatgcacctcatgaatgagttgtacctgacttcctttgacgagaaatttcagtggaaaattgaggcctggcgtttgtacctcgcgctctactatgttgtctgcatcggcatgaccatcttctgtctcgatggtggtcatgctgacgagccctcgcgggaggcaagtccagacctcggcgcggcaggggcggagctcgaggacgagagcgcgcaggccggagctgtccagggtcctgagacgctgcggagtcaggttagtaggcagtgtcaggagattgacttgcatgatcttttcgagggcgtgagggaggttcagatggtacttgatctccacgggtccgttggtggagatgtcgatggcttgcagggttccgtgccccttgggtgctaccaccgtgcccttgtttttccttttgggcggcggtggctctgttgcttcttgcatgtttagaagcggtgtcgagggcgcgcaccgggcggcaggggcggttcgggacccggcggcatggctggcagtggtacgtcggcgccgcgcgcgggtaggttctggtactgtgctctgagaagactcgcatgcgcgacgacgcggcggttgacatcctggatctgacgcctctgggtgaaagctaccggccccgtgagcttgaacctgaaagagagttcaacagaatcaatctcggtatcgttgacggcggcttgcctaaggatttcttgcacgtcgccagagttgtcctggtaggcgatctcggccatgaactgctcgatctcttcctcttgaagatctccgcggcccgctctctcgacggtggccgccaggtcgttggagatgcgcccaatgagttgagagaatgcattcatgcccgcctcgttccagacgcggctgtagaccacagcccccacgggatctctcgcgcgcatgaccacctgggcgaggttgagctccacgtggcgggtgaagaccgcatagttgcatagacgctggaaaaggtagttgagtgtggtggcgatgtgctcggtgacgaagaaatacatgatccatcgtctcagcggcatctcgctgacatcgcccagcgcttccaagcgctccatggcctcgtagaagtccacggcaaagttgaaaaactgggagttacgcgcggacacggtcaactcctcttccagaagacggatgagttcggcgacggtggtgcgcacctcgcgctcgaaagcccctgggatttcttcctcaatctcttcttcttccactaacatctcttcctcttcaggtggggctgcaggaggagggggaacgcggcgacgccggcggcgcacgggcagacggtcgatgaatctttcaatgacctctccgcggcggcggcgcatggtctcggtgacggcacgaccgttctccctgggtctcagagtgaagacgcctccgcgcatctccctgaagtggtgactgggaggctctccgttgggcagggacaccgcgctgattatgcattttatcaattgccccgtaggtactccgcgcaaggacctgatcgtctcaagatccacgggatctgaaaacctttcgacgaaagcgtctaaccagtcgcaatcgcaaggtaggctgagcactgtttcttgcgggcgggggcggctagacgctcggtcggggttctctctttcttctccttcctcctctttggagggtgagacgatgctgctggtgatgaaattaaaataggcagttttgagacggcggatggtggcgaggagcaccaggtctttgggtccggcttgttggatgcgcaggcgatgggccattccccaagcattatcctgacatctggccagatctttatagtagtcttgcatgagtcgttccacgggcacttcttcttcgcccgctctgccatgcatgcgagtgatcccgaacccgcgcatgggctggacaagtgccaggtccgctacaaccctttctgcgaggatggcttgctgcacctgggtgagggtggcttggaagtcgtcaaagtccacgaagcggtggtaagccccggtgttgattgtgtaggagcagttggccatgactgaccagttgactgtctggtgccccggacgcacaatctcggtgtacttgaggcgcgagtaggcgcgggtgtcaaagatgtaatcgttacaggtgcgcaccaggtactggtagccgataagaaagtgcggcggcggctggcggtataggggccatcgctctgtagccggggcgccaggggcgaggtcttccagcatgaggcggtgataaccgtagatgtacctggacatccaggtgataccggaggcggtggtggatgcccgcgggaactcgcgtacgcggttccagatgttgcgcagcggcatgaagtagttcatggtaggcacggtttggcccgtgagacgtgcacagtcgttgatgctctagacatacgggcaaaaacgaaagcggtcagcggctcgtctccgtggcctggaggctaagcgaacgggttgggctgcgcgtgtaccccggttcgaatctcggatcaggctggagccgcagctaacgtggtactggcactcccgtctcgacccaggcctgcacaaaacctccaggatacggaggcgggtcgtttttttttttttttgctttttcctggatgggagccagtgctgcgtcaagctttagaacactcagttctcggggctgggagtggctcgcgcccgtagtctggagaatcaatcgccagggttgcgttgcggtgtgccccggttcgagtcttagcgcgccggatcggccggtttccgcgacaagcgagggtttggcagccccgtcatttctaagaccccgccagccgacttctccagtttacgggagcgagccctctttttttgtttttttgttgcccagatgcatcccgtgctgcgacagatgcgcccccagcaacagcccccttctcagcagcagctacaacaacagccacaaaaggctcttcctgctcctgtaactactgcggctgcagccgtcagcggcgcggggcagcccgcctatgatctggacttggaagagggcgagggactggcgcgcctgggcgcaccatcgcccgagcggcacccgcgggtgcaactgaaaaaggactctcgcgaggcgtacgtgccccagcagaacctgttcagggacaggagcggcgaggagcctgaggaaatgcgagcttcccgctttaacgcgggtcgcgaactgcgtcacggtctggaccgaagacgggtgctgcgtgatgatgattttgaagtcgatgaagtgacaggaataagtcctgctagggcacatgtggccgcggccaacctagtatcagcttacgagcagaccgtgaaggaggagcgcaactttcaaaaatctttcaacaaccatgtgcgcaccctgattgcccgcgaggaagtgacactgggactgatgcacctgtgggacctgatggaagccattacccagaaccccaccagcaaacctctaaccgctcagctgtttctggtggtgcaacatagtagagacaatgaggcatttagggaggcgctgttgaacattactgagcccgaggggagatggttgtatgatcttatcaatattctgcaaagtataatagtgcaagaacgtagcctgggtctagctgagaaggtggctgctattaactactcggtcttgagcctgggcaagcactacgctcgcaagatctacaaaaccccatacgtacctatagacaaggaggtgaagatagatgggttttatatgcgcatgactctcaaggtgctgaccttgagtgacgatctgggagtgtaccgcaacgacaggatgcaccgcgcagtgagcgccagcagaaggcgtgagctgagcgacagagaacttatgcacagcttgcaaagagctctgactggggctggaaccgagggggagaactactttgacatgggagcggacttgcaatggcagcccagtcgcagggccctggacgcagcagggtatgagcttccttacatagaagaggtggatgaaggccaggatgaggagggcgagtacctggaagactgatggcgcgaccatccatatttttgctagatggaacagcaggcaccggaccccgcaaaacgggcggcgctacagagccagccgtccggcattaactcctcggacgattggagccaggccatgcaacgcatcatggcgctgacgacccgcaaccccgaagcctttaggcagcaaccccaggccaaccgcctttctgctatcctggaggccgtagtgccctcccgctccaaccccacacacgagaaggtcctggccatcgtgaacgcgctggtggagaacaaagccatacgtcccgatgaggctgggctggtatacaatgccctattggagcgcgtagcccgctacaacagcagcaacgtgcagaccaacctggaccggatggtgaccgatgtgcgcgaggccgtgtctcagcgcgagcggttccagcgagacgccaatttagggtcgctggtggctttgaacgccttcctcagcactcagcctgccaacgtgcctcgcggtcagcaagactacacaaactttctaagtgcattgagactcatggtggccgaagtccctcaaagcgaagtgtaccagtccgggccagactactttttccagaccagcagacagggcttgcagacagtgaacctgagccaggcttttaagaacctgaatggtctgtggggagtgcgcgccccagtgggagatcgggcgaccgtgtctagcttgctgacccccaactcccgcctactactgctcttggtagccccattcactgacagcggtagcatcgaccgtaattcgtacttgggctatctgttgaacctgtatcgcgaggccatagggcaaactcaggtagatgagcaaacctatcaagaaattacccaagtgagccgcgctctgggtcgggaggacactggcagcttggaagccaccttaaacttcttgctgaccaaccggtcgcagaagatccctcctcagtatgcgcttaccgcggaggaggaacggatcctgagatacgtgcagcagagcgtgggactgttcctaatgcaggagggggcgactcctactgctgcgctcgatatgacagcccgaaacatggagcccagcatgtatgccagtaaccggccttttatcaataaactgctagactacttacacagggcggctgctatgaactctgattatttcaccaatgctatcctgaacccccattggctgcccccacctgggttctatacgggcgagtatgacatgcccgaccccaatgacgggtttttatgggacgatgtggacagtagtgttttctccccgcctcctggttataacacttggaagaaggaaggtggcgatagaaggcactcttccgtgtcactgtccggggcaacgggtgctgccgcagcggctcccgaggccgcaagtcctttccctagtttgccattttcgctaaacagtgtacgcagcagtgagctgggaagaataacccgtcctcgcttgatcggcgaggaggagtatttgaacgactccctgttgagacccgagagggagaagaatttccccaacaacgggatagaaagcttggttgacaaaatgaaccgctggaagacgtacgcgcacgatcacagggacgatccccgggcgctgggggatagccggggcagcgctacccgtaaacgccagtggcacgacaggcagcggggcctggtgtgggccgatgatgattccgccgacgacagcagcgtgttggacttgggtgggagtggtggtaacccgttcgctcacctgcgcccccgcgtcgggcgcctgatgtaagaaaccgaaaataaatactcaccaaggccatggcgaccagcgtgcgttcgtttcttctctgttatatctagtatgatgaggcgaaccgtgctaggcggagcggtggtgtatccggagggtcctcctccttcgtacgagagcgtgatgcagcaggcggcggcggcgacgatgcagccaccactggaggctccctttgtaccccctcggtacctggcacctacggaggggagaaacagcattcgttactcggagctggcaccattgtatgataccacccggttgtatttggtggacaacaagtccgcggacatcgcctcactgaactatcagaacgaccacagcaacttcctcaccacggtggtgcaaaacaatgactttacccccacggaggccagcacccagaccatcaactttgacgagcggtcgcgatggggcggtcagctgaagactatcatgcacaccaacatgcccaacgtgaacgagtacatgtttagcaacaagttcaaagctcgggtgatggtgtctagaaaggctcctgaaggtgtcacagtagatgacaattatgatcacaagcaggatattttggaatatgagtggtttgagtttactctaccggaagggaatttctcagccacaatgaccattgacctaatgaacaatgccatcattgataattaccttgaagtgggcagacagaatggagtgttagagagtgacattggtgttaaatttgacaccaggaactttagactgggttgggatccggaaactaagttgattatgcctggggtttacacctatgaggcattccatcctgacattgtattgttgcctggttgcggagttgactttactgaaagtcgccttagtaacttgcttggtatcaggaaaagacacccattccaggagggttttaagatcttgtatgaggatcttgaagggggtaatatcccggccctgttggatgtagaagcctatgagaacagtaagaaagaacaagaagccaaaacagaagccgctaaagctgctgctattgctaaagccaacatagttgtcagcgaccctgtaagggtggctaatgcagaagaagtcagaggagacaactatacagcttcatctgttgcaactgacgaatcgctattggctgctgtggccgaaactacagagacaaaactcactattaaacctgtagaaaaagacagcaagagtagaagttacaatgtcttggaagataaagtgaatacagcctaccgcagctggtacctgtcctacaactatggtgaccctgaaaaaggagtccgttcctggacactgctcaccacctcggatgtcacctgtggagcagagcaggtgtactggtcgctcccagacatgatgcaggaccctgtcacattccgttccacgagacaagtcagcaactatccagtggtaggtgcagagctcatgccggtcttctcaaagagtttctacaacgagcaagccgtgtactcccagcagcttcgccagtccacctcgctcacgcacgtcttcaaccgcttccctgagaaccagatcctcatccgcccgccagcgcccaccattaccaccgtcagtgaaaacgttcctgctctcacagatcacgggaccctgccgttgcgcagcagtatccggggagtccagcgcgtgaccgttactgacgccagacgccgcacctgcccctacgtctacaaggccctgggcatagtcgcgccgcgcgtcctttcaagccgcactttctaaaaaaaaaaatgtccattcttatctcacctagtaataacaccggttggggcctgcgcgcgccaagcaagatgtacggaggtgctcgcaaacgctctacacagcaccctgtgcgcgtgcgcgggcacttccgcgctccatggggcgccctcaagggtcgtgcccgcactagaaccaccgtcgatgatgtgatcgaccaggtggtggccgatgctcgtaattatactcctactgcacctacatctactgtggatgcagttattgacagcgtagtggctgacgcccgcgcctatgctcgccggaagagcaggcggagacgcatcgccaggcgccaccgggctactcccgctatgcgagcggcaagagctctgctacggagggccaaacgcgtggggcgaagagctatgcttagagcggccagacgcgcggcttcaggtgccagtgccggcaggtcccgcaggcgcgcagccacggcggcagcagcggccattgccaacatggcccaaccgcgaagaggcaatgtgtactgggtgcgcgacgccaccaccggccagcgcgtgcccgtgcgcacccgcccccctcgctcttagaagatactgagcagtctccgatgttgtgtcccagcgaggatgtccaagcgcaaatacaaggaagagatgctccaggtcatcgcgcctgaaatctacggtccgccggtgaaggatgaaaaaaagccccgcaaaatcaagcgggtcaaaaaggacaaaaaggaagaagatggcaatgatggtctggcggagtttgtacgcgagttcgccccaaggcggcgtgtgcagtggcgtggacgcaaagtgcggcctgtgctgagacctggaaccacggtggtctttacgcccggcgagcgctccagcactgcttttaagcggtcctatgatgaggtgtatggggatgatgatattctggagcaggcggccgaccgcctgggcgagtttgcttatggcaagcgctcccgctcgagccccaaggaggaggcggtgtccattcccttggacaatgggaatcccacccctagtctcaagccagtcaccctgcagcaagtgctgcccgtgcctccacgcagaggcaacaagcgagagggtgaggatctgtatcccactatgcaattgatggtgcccaagcgccagcggctggaggacgtgctggagaaaatgaaagtggatcccgatatacaacctgaggtcaaagtgagacccatcaagcaggtggcgccaggtttgggagtacaaaccgtagacatcaagattcccaccgagtccatggaagtccaaaccgaacctgcaaagcccacaaccacctccattgaggtgcaaacggatccctggatgaccgcacccgttacaactccagctgctgtcaacaccactcgaagatcccggcgaaagtacggtccagcaagtttgctgatgccaaattatgctctgcacccatccattattccaactccgggttaccgaggcactcgctactaccgcagcaggagcagcacttcccgccgtcgccgcaaaacacctgcaagtcgtagtcaccgtcgtcgccgccgccccaccagcaatctgactcccgctgctctggtgcggagagtgtatcgcgatggccgcgcggatcccctgacgttgccgcgcgtacgctaccatccaagcatcacaacttaacaactgttgccgctgcctccttgcagatatggccctcacttgccgccttcgtgtccccattactggctaccgaggaagaaactcgcgccgtagaagagggatgttggggcgcggaatgcgacgccacaggcggcggcgcgctatcagcaagaggctggggggtggctttctgcctgctctgatccccatcatagccgcggcgatcggggcgataccaggcatagcttccgtggcggttcaggcctcgcagcgccactgacattggaaaaacttataaataaaacagaatggactctgatgctcctggtcctgtgactatgtttttgtagagatggaagacatcaatttttcatccctggctccgcgacacggcacgaggccgtacatgggcacctggagcgacatcggcaccagccaactgaacgggggcgccttcaattggagcagtatctggagcgggcttaaaaattttggctctaccataaaaacctatgggaacaaagcttggaacagcagcacagggcaggcattgagaaataagcttaaagagcaaaacttccaacagaaggtggttgatggaatcgcctctggtatcaatggggtggtggatctggccaaccaggccgtgcagaaacagataaacagccgcattgacccgccgccgtcagccccgggtgaaatggaagtggaggaagatctccctccccttgaaaagcggggcgacaagcgtccgcgccccgatctggaggagacactagtcacacgctcagacgacccgccctcctacgaggaggcagtgaagcttggaatgcccaccaccagacctgtagcccccatggctaccggggtaatgaaaccttctcagtcacaccgacccgctaccttggacttgcctccccctgctgttgcagcgcctgctcgcaagcctgtcgctaccccgaagcccaccaccgtacagcccgtcgccgtagccagaccgcgtcctgggggcactccacgtccgaatgcaaactggcagagtactctgaacagcatcgtgggtctgggcgtgcaaagtgtaaagcgccgtcgctgcttttaaattaaatatggagtagcgcttaacttgcctgtctgtgtgtatgtgtcatcatcacgccgccgccgcagcaacagcagaggagcaaggaagaggtcgcgcgccgaggctgagttgatttcaagatggccaccccatcgatgctgccccagtgggcatacatgcacatcgccggacaggatgcttcggagtacctgagtccgggtctggtgcagttcgcccgcgccacagacacctacttcaatctggggaacaagtttaggaaccccaccgtggcgcccacccatgatgtgaccaccgaccgcagtcagcggctgatgctgcgctttgtgcccgttgaccgggaagacaatacctacgcatacaaagttcgatacaccttggctgtgggcgacaacagagtgctggatatggccagcactttctttgacattcggggtgtgttggatagaggccctagcttcaagccatactctggcactgcttacaactcgttggcccctaagggcgctcccaatacatctcagtggattgctgaaggcgtaaaaaaagaagatgggggatctgacgaagaggaagagaaaaatctcaccacttacacttttggaaatgccccagtgaaagcagaaggtggtgatatcactaaagacaaaggtcttccaattggttcagaaattacagacggcgaagccaaaccaatttatgcagataaactataccaaccagaacctcaggtgggagatgaaacttggactgacacagatggaacaactgagaagtatggtggtagagctctaaagccagaaactaaaatgaaaccctgctatgggtcttttgctaaacccactaacgtcaaaggcggacaggcaaaacaaaaaactactgaacaaccgcaaaaccagcaggttgaatatgatattgacatgaacttttttgatgaagcgtcacagaaagcaaacttcagtccaaaaattgtgatgtatgcagaaaatgtagacttggaaaccccagacactcatgtggtgtacaaacctggtacttcagaagaaagttctcatgctaatctgggtcaacaatctatgcccaacagacccaactacattggctttagagataactttattggacttatgtactacaacagtactggcaacatgggagtgctggcaggtcaagcatcccaattgaatgcggtggttgacttgcaggacagaaacacagaactatcatatcaactactgcttgactctctgggtgacagaaccagatacttcagcatgtggaatcaagcagtcgatagctatgatcctgatgtgcgcattattgaaaatcatggggtggaagatgagcttcccaactactgctttccattggatggagtaggggtaccaataagtagttacaaaataattgaaccaaacggacagggtgcagattggaaagagcctgacataaatggaacaagtgaaattggacaaggaaatctctttgccatggaaattaacctccaagctaatctctggagaagttttctttattccaatgtggctctgtatctcccagactcctacaaatacaccccagccaatgtcactcttccaactaacaccaacacttatgactacatgaatgggcgggtggttcccccatccctggtggatacctacgtaaacattggcgccagatggtctttggatgccatggacaatgtcaacccctttaaccatcaccgcaacgctggcctgcgataccggtccatgcttttgggcaatggtcgttacgtgcctttccacattcaagtgcctcagaaattctttgctgtgaagaacctgctgcttctacccggttcttacacctacgagtggaacttcagaaaggatgtgaacatggtcctgcagagttcccttggtaatgatctccgggtcgatggtgccagcataagttttaccagcatcaatctctatgccaccttcttccccatggcccacaacactgcctccacccttgaagccatgctgcgcaatgacaccaatgatcaatcattcaatgactacctttctgctgccaacatgctctaccccatcccggccaacgctaccaacgttcccatctccattccctctcgcaactgggccgccttcagaggctggtccttcaccagactcaaaaccaaggagactccctctttgggatcagggttcgatccctactttgtttactctggttctataccctacctggatggtaccttctaccttaaccacactttcaagaaagtctccatcatgtttgactcttcagtgagctggcctggtaatgacagattgctaagtccaaatgagttcgaaatcaagcgcacagttgatggggaaggctacaatgtggcccaatgtaacatgaccaaagactggttcctggtccagatgcttgccaactacaacattggataccagggcttctacgttcctgagggttacaaggatcgcatgtactccttcttcagaaacttccagcccatgagtagacaggtggttgatgagattaactacaaagactataaagctgtcgccgtaccctaccagcataataactctggctttgtgggttacatggctcctaccatgcgtcagggtcaagcgtaccctgctaactacccataccccctaattggaaccactgcagtaaccagtgtcacccagaaaaaattcctgtgcgacaggaccatgtggcgcatcccattctctagcaacttcatgtccatgggtgcccttacagacctgggacagaacttgctgtatgccaactcggcccatgcgctggacatgacttttgaggtggatcccatggatgagcccaccctgctttatcttcttttcgaagtcttcgacgtggtcagagtgcaccagccacaccgcggcgtcatcgaggccgtctacctgcgcacaccgttctcggccggcaacgccaccacataagaagcctcttgcttcttgcaagcagcagctgcagccatgtcatgcgggtccggaaacggctccagcgagcaagagctcaaagccatcgtccgagacctgggctgcggaccctatttcctgggaacctttgacaagcgtttcccggggttcatggcccccgacaagctcgcctgcgccatagtcaacactgccggacgcgagacggggggagagcactggctggcttttggttggaacccgcgctccaacacctgctacctttttgatccttttgggttctcggatgagcgactcaaacagatttaccagtttgagtacgaggggctcctgcgccgcagtgcccttgctaccaaagaccgctgcatcaccctggaaaagtccacccagagcgtgcagggcccgcgctcagccgcctgtggacttttttgctgtatgttccttcatgcctttgtgcactggcccgaccgccccatgaacggaaaccccaccatgaagttgctgactggggtgtcaaacagcatgctccaatcaccccaagtccagcccaccctgcgtcgcaaccaggaggcgctatatcgcttcctaaacacccactcatcttactttcgttctcaccgcgcacgcatcgaaagggccaccgcgtttgaccgtatggatatgcaataagtcatgtaaaaccgtgttcaataaaaagcactttatttttacatgcactaaggctctggttttttgctcattcgttttcatcattcactcagaaatcaaatgggttctggcgtgagtcagagtgacccgtgggcagggagacgttgcggaactgtaacctgttctgccacttgaactcggggatcaccagcttgggaactggaatttcgggaaaggtgtcttgccacaactttctggtcagttgcagggcgccaagcaggtcaggagcagagatcttgaaatcacagttggggccggcattctggacacgggagttgcggtacactgggttgcaacactggaacaccatcaaggctgggtgtctcacgcttgccagcacggtcgggtcactgatggtagtcacatccaagtcttcagcattggccattccaaagggggtcatcttacaggtctgcctgcccatcacgggagcgcagcctggcttgtggttgcaatcgcaatgaatggggatcagcatcatcctggcttggtcgggggttatccctgggtacacggccttcatgaaggcttcgtactgcttgaaagcttcctgagccttacttccctcggtgtaaaacatcccacaggacttgctggaaaattggttagtagcacagttggcatcattcacacagcagcgggcatcgttgttggccaactggaccacatttctgccccagcggttctgggtgatcttggctctgtctgggttctccttcatagcgcgctgcccgttttcgctcgccacatccatctcgataatgtggtccttctggatcataatagtgccatgcaggcatttcaccttgccttcgtaatcggtgcatccatgagcccacagagcgcacccggtgcactcccaattattgtgggcgatctcagaataagaatgcaccaatccctgcatgaatcttcccatcatcgctgtcagggtcttcatgctactaaatgtcagcgggatgccacggtgctcctcgttcacatactggtggcagatacgcttgtactgctcgtgctgctctggcatcagcttgaaagaggttctcaggtcattatccagcctatacctctccattagcacagccatcacttccatgcccttctcccaggcagataccaggggcaagctcaaaggattcctaacagcaatagaagtagctcctttagctatagggtcattcttgtcgatcttctcaacacttctcttgccatccttctcaatgatgcgcaccggggggtagctgaagcccacggccaccaactgagcctgttctctttcttcttcgctgtcctggctgatgtcttgcagagggacatgcttggtcttcctgggcttcttcttgggagggatcgggggaggactgttgctccgttccggagacagggatgaccgcgaagtttcgcttaccagtaccacctggctctcgatagaagaatcggaccccacgcgacggtaggtgttcctcttcgggggcagaggtggaggcgactgagatgggctgcggtccggccttggaggcggatggctggcagagcccattccgcgttcgggggtgtgctcccgttggcggtcgcttgactgatttcctccgcggctggccattgtgttctcctaggcagagaaacaacagacatggaaactcagccatcactgccaacatcgctgcaagcgccatcacacctcgcccccagcagcgacgaggaggagagcttaaccaccccaccacccagtcccgctaccaccacctctaccctcgatgatgaggaggaggtcgacgcagcccaggagatgcaggcgcaggataatgtgaaagcggaagagattgaggcagatgtcgagcaggacccgggctatgtgacaccggcggagcacgaggaggagctgaaacgttttctagacagagaggatgacgaccgcccagagcatcaccaggaggctggcctcggggatcatgttgccgactacctctccgggcttgggggggaggacgtgctcctcaaacatctagcaaggcagtcgatcatagttaaagacgcactactcaacctcaccgaagtgcccatcagtgtggaagagcttagccgcgcctacgagctgaacctcttttcgcctcagataccccccaagcggcagcgaaacggcacctgcgaggccaaccctcgactcaacttctatccagcttttactgtccccgaagtgctggccacctaccacatcttttttaagaaccaaaagattccagtctcctgccgcgccaaccgcacccgcgcagatgcccttctcaacttgggtccgggagctcgtttacctgatatagcttccttggaagaggttccaaagatctttgagggtctgggaagtgatgagactcgggccgcaaatgctctgcaacagggagagaatggcatggatgaacatcacagcgctctagtggaactggagggtgacaatgcccggcttgcagtgctcaagcgcagtatcgtggtcacccattttgcctaccccgctgttaacctgccgcccaaagtcatgagcgctgtcatggaccatctgctcatcaaacgagcaagtccactttcagaaaaccagaacatgcaggatccagacgcctcggacgagggcaagccggtagtcagtgacgagcagctatctcgctggctgggtaccaactccccccgagatttggaagaaagacgcaagcttatgatggctgtagtgctagtaactgttgagttggagtgtctgcgccgcttttttaccgaccccgagaccctgcgcaagctagaggagaacctgcactacaccttcagacatggcttcgtgcgccaggcatgcaagatctccaacgtggagctcaccaacctggtttcatacatgggcattttgcatgagaaccggctagggcagagcgttctgcacaccaccctgaagggggaggcccgccgcgactacatccgagactgtgtctacctctacctctgccatacctggcagactggtatgggtgtgtggcaacagtgtttggaagagcagaaccttaaagagctggacaagctcttgcagagatccctcaaagccctgtggacaggttttgacgagcgcaccgtcgcctcggacctggcggacatcatcttccccgagcgtcttagggttactctgcgaaacggcctgccagacttcatgagccagagcatgcttaacaactttcgctctttcatcctggaacgctccggtatcctgcctgccacctgctgtgcgctgccctccgactttgtgcctctcacctaccgcgagtgcccaccgccgctatggagccactgctacctattccgcctggccaactacctctcctaccactcggatgtgatagaggatgtgagcggagacggcctgctggaatgccactgccgatgcaatttatgcacaccccaccgctccctcgcctgcaacccccagttgctaagcgagacccagatcatcggcaccttcgagttgcagggtcccaacagtgaaggcgaggggtcttctccggggcagagtctgaaactgacaccggggctgtggacctccgcctacctgcgcaagttttatcccgaggactatcatccctatgagatcaggttctatgaggaccagtcacatcctcccaaagtcgagctctcagcctgcgtcatcacccagggggcaattctggcccaattgcaagccatccaaaaatcccgccaagaatttctgctgaaaaagggaagcggggtctaccttgacccccagaccggtgaggagctcaacacaaggttcccccaggatgtcccatcgccgaggaagcaagaagctgaaggtgcagctgtcacccccagaggatatggaggaagactgggacagtcaggcagaggaggagatggaagattgggacagccaggcagaggaggtggacagcctggaggaagacagtttggaggaggaagacgaggaggcagaggaggtggaagaagcaaccgccgccaaacagttgtcatcggcggcggagacaagcaagtccccagacagcagcacggctaccatctccgctccgggtcggggggcccagcggcggcccaacagtagatgggacgagaccgggcgatttccaaacccgaccaccgcttccaagaccggtaagaaggagcgacagggatacaagtcctggcgtggacataaaaacgctatcatctcctgcttgcatgaatgcgggggcaacatatccttcacccggcgatacctgcttttccaccacggtgtgaacttcccccgcaatatcttgcattactaccgtcacctccacagcccctactgcagtcagcaagtcccggcaaccccgacagaaaaagacagcagcgacaacggtgaccagaaaaccagcagttagaaaatccacaacaagtgcagcaggaggaggactgaggatcacagcgaacgagccagcgcagaccagagagctgaggaaccggatctttccaaccctctatgccatcttccagcagagtcgggggcaagagcaggaattgaaagtaaaaaaccgatctctgcgctcgctcaccagaagttgtttgtatcacaagagcgaagaccaacttcagcgcactctcgaggacgccgaggctctcttcaacaagtactgcgcgctgactcttaaagagtagcccttgcccgcgctcattcgaaaacggcgggaatcacgtcacccttggcagctgtcctttgccctcgtcatgagtaaagacattcccacgccttacatgtggagctatcagccccaaatggggttggcagcaggtgcttcccaggactactccacccgcatgaattggcttagcgccgggccctcaatgatatcacgggttaatgatatacgagcttatcgaaaccagttactcctagaacagtcagctcttaccaccacaccccgccaacaccttaatccccgaaattggcccgccgccctggtgtaccaggaaaatcccgctcccaccaccgtactacttcctcgagacgcccaggccgaagttcagatgactaacgcaggtgtacagctggcgggcggttccgccctatgtcgtcaccggcctcaacagagtataaaacgcctggtgatcagaggccgaggtatccagctcaacgacgagtcggttagctcttcgcttggtctgcgaccagacggagtcttccagatcgccggctgtgggagatcttccttcactcctcgtcaggctgtgctgactttggagagttcgtcctcgcagccccgctcgggcggcatcggaactctccagtttgtggaggagtttactccctctgtctacttcaaccccttctccggctctcctggccagtacccggacgagttcataccgaacttcgacgcaatcagcgagtcagtggatggctatgattgatgtctaatggtggcgcggctgagctagctcgactgcgacacctagaccactgccgccgctttcgctgtttcgcccgggaactcaccgagttcatttacttcgaactctccgaggagcaccctcagggtccggcccacggagtgcggattaccatcgaagggggaatagactctcgcctgcatcgcatcttctcccagcggcccgtgctgattgagcgcgaccagggaaatacaaccatctccatctactgcatctgtaaccaccccggattgcatgaaagcctttgctgtcttgtttgtgctgagtttaataaaaactgagttaagaccctcctacggactaccgcttcttcaatcaggactttacaacaccaaccagatcttccagaagacccagacccttcctcctctgatccaggactctaactctaccttaccagcaccctccactactaaccttcccgaaactaacaagcttggatctcatctgcaacaccgcctttcacgaagccttctttctgccaatactaccactcccaaaaccggaggtgagctccgcggtcttcctactgacgacccctgggtggtagcgggttttgtaacgttaggattagttgcgggtgggcttgtgctaatcctttgctacctatacacaccttgctgtgcatatttagtcatattgtgctgttggtttaagaaatgggggccatactagtcgtgcttgctttactttcgcttttgggtctgggctctgctaatctcaatcctcttgatcacgatccatgtctagacttcgacccagaaaattgcacacttacttttgcacccgacacaagccgtctctgtggagttcttattaagtgcggatgggactgcaggtccgttgaaattacacataataacaaaacatggaacaatacattatccaccacatgggaaccaggagttcccgagtggtatactgtctctgtccgaggtcctgacggttccattcgcattagtaacaacactttcattttttctgaaatgtgcgatctggccatgtttatgagcaaacagtatgacctatggcctcctagcaaagagaacattgtggcattttccattgcttattgcttggtaacatgcatcatcactgctatcatttgtgtgtgcatacacttgcttatagttattcgccctagacaaagcaatgaggaaaaagagaaaatgccttaacctttttcctcataccttttctttacagcatggcttctgttacagctctaattattgccagcattgtcactgtcgctcacgggcaaacaattgtccatattaccttaggacataatcacactcttgtagggcccccaattacttcagaggttatttggaccaaacttggaagtgttgattattttgatataatttgcaacaaaactgaaccaatatttgtaatctgtaacagacaaaatctcacgttaattaatgttagcaaaatttataacggttactattatggttatgatagatccagtagtcaatataaaaattacttagttcgcataactcagcccaaatcaacagtgccaactatgacaataattaaaatggctaataaagcattagaaaattttacattaccaacaacgcccaatgaaaaaaacattccaaattcaatgattgcaattattgcggcggtggcattgggaatggcactaataataatatgcatgttcctatatgcttgttgctataaaaagtttcaacataaacaggatccactactaaattttaacatttaattttttatacagatgatttccactacaatttttatcattactagccttgcagctgtaacttatggccgttcacacctaactgtacctgttggctcaacatgtacactacaaggaccccaagaaggctatgtcacttggtggagaatatatgataatggagggttcgctagaccatgtgatcagcctggtacaaaattttcatgcaacggaagagacttgaccattattaacataacattaaatgagcaaggcttctattatggaaccaactataaaaatagtttagattacaacattattgtagtgccagccaccacttctgctccccgcaaatccactttctctagcagcagtgccaaagcaagcacaattcctaaaacagcttctgctatgttaaagcttcgaaaaatcgctttaagtaattccacagcagctcccaatacaattcctaaatcaacaattggcatcattactgccgtggtagtgggattaatgattatatttttgtgcataatgtactacgcctgctgctatagaaaacatgaacaaaaaggtgatgcattactaaattttgatatttaattttttatagaattatgatattgtttcaatcaaatgccactaacactctcaatgtgcagactactttaaaacatgacatggaaaaccacactacctcctatgcatacacaaatattcagcctaaatacgctatgcaactagaaatcaccatactaattgtaattggaattcttacactatctgttattctttattttatattctgccgtcaaatacccaatgttcatagaaattctaaaagacgtcccatctattctcctatgattagtcgtccccatatggctctgaatgaaatctaagatctttttttttcttttacagtatggtgaacatcaatcatgattcctagaaatttcttcttcaccatactcatctgtgctttcaatgtctgtgctactttcacagcagtagccactgcaagcccagactgtataggaccatttgcttcctatgcactttttgcctttgttacttgcatctgcgtgtgtagcatagtctgcctggttattaattttttccaactggtagactggatctttgtgcgaattgcctacctacgtcaccatcccgaataccgcaatcaaaatgttgcggcacttcttaggcttatttaaaaccatgcaggctatgctaccagttattttaattctgctactaccctgcattgccctaccttccaccgccactcgcgctacacctgaacaacttagaaaatgcaaatttcaacaaccatggtcatttcttgattgctaccatgaaaaatctgattttcccacatactggatagtgattgttggaataattaacatactttcatgtaccgttttctcaatcacaatataccccacatttaattttgggtggaattctcccaatgcactgggttacccacaagaactagatgaacatatcccactacaacacatacaacaaccactagcattggtagagtatgaaaatgagccacaaccttcactgcctcctgctattagttacttcaacctaaccggcggagatgactgaaatactcaccacctccaattccgccgaggatctgcttgatatggacggccgcgcctcagaacagcgactcgcccaactacgcatccgccagcagcaggaacgcgtgaccaaagagctcagagatgtcatccaaattcaccaatgcaaaaaaggcatattttgtttggtaaaacaagccaagatatcctacgagatcaccgctactgaccatcgcctttcttacgaacttggcccccaacgacaaaaatttacatgcatggtgggaatcaaccctatagttatcacccagcaaagtggagatactaagggttgcattcactgctcttgcgattccaccgagtgcacctacaccctgctgaagaccctatgcggcctaagagacctgctacccatgaattaaaaattaataaaaaattacttacttgaaatcagcaataaggtctctgttgaaattttttcccagcagcacctcgcttccctcttcccaactctggtattctaaaccccgttcagcggcatactttctccatactttaaatgggatgtcaaattttagctcctctcctgtacccacgatcttcatgtctttcttcccagatgaccaagagagtccggctcagtgattccttcaaccctgtctacccctatgaagatgaaagcacctcccaacacccctttataaacccagggtttatttccccaaatggctttacacaaagcccagacggagttcttactttaaattgtttaaccccactaacaaccacaggcgggcctttacagttaaaagtgggagggggacttatagtggatgacactgatgggaccttacaagaaaacatacgtgctacagcacccattactaaaaataatcattctgtagaactatccattggaaatggattagaaacacaaaacaataaactatgtgccaaattgggaaatgggttaaaatttaacaacggtgacatttgtataaaggatagtattaacaccttatggactggaataaagcctccacctaactgtcaaattgtggaaaacactgatacaaacgatggcaaacttactttagtattagtaaaaaacggagggcttgttaatggctacgtatctctagttggtgtatcagacactgtgaaccaaatgttcacacaaaagtcagcaaccatacaattaagattatatttcgactcttctggaaatctattaactgatgaatcaaacttaaaaattccacttaaaaataaatcttctacagcaaccagtgaagctgcaaccagcagcaaagcctttatgccaagtactacagcttatccctttaacaccactactagggatagtgaaaactatattcatggaatatgttactatatgactagttatgatagaagtctagttcccttaaacatttctataatgctaaacagccgtacgatttcttccaatgttgcctatgccatacaatttgaatggaatctaaatgcaaaagaatctccagaaagcaacatagctacgctgaccacatccccctttttcttttcttatattagagaagacgacaactaaaaaataaagtttaagtgtttttatttaaaaatcacaaaattcgagtagttattttgcctcccccttcccatttaacagaatacaccaatctctccccacgcacagctttaaacatttggataccattagagatagacatagttttagtttccacattccaaacagtttcagagcgagccaatctggggtcagtgatacataaaaatgcatcgggatagtcttttaaagcgctttcacagtccaactgctgcggatgcgactccggagtctggatcacagtcatctggaagaagaacgatgggaatcataatccgaaaacggaatcgggcgattgtgtctcatcaaacccacaagcagccgctgtctgcgtcgctccgtgcgactgctgtttatgggatcggggtctgcagtgtcctgaagcatgattttaatagcccttaacattaactttctggtgcgatgcgcgcagcaacgcattctgatttcacttagattactacagtatgtacagcacattatcacaatattgtttaataaaccataattaaaagcgctccagccaaaactcatatctgatacaatcgcccctgcatgaccatcataccaaattttaatataaattaaatgtcgttccctcaaaaacacactacccacatacatgatctcttttggcatgtgcatattaacaatctgtctgtaccatggacaacgttggttaatcatgcaacccaatataaccttccggaaccacactgccaacaccgctcccccagccatgcattgaagtgaaccctgctgattacaatgacaatgaagaacccaattctctcgaccatgaatcacttgagactgaaaaatatctatagtagcacaacaaagacataaatgcatgcatcttctcataatttttaactcatctggatttaaaaacatatcccaaggaatgggaaactcttgcaaaacagtaaagctggcagaacaaggaagaccacgaacacaacttacactatgcatagtcatagtatcacaatctggcaacagcgggtggtcttcagtcatagaagctcgggtttcattttcctcacatcgtggtaactgggctctggtgtaagggtgatgtctggcgcatgatgtcgagcgtgcgcgcaaccttgtcataatggagttgtttcctgacattctcgtattttgtatagcaaaatgcggccctggcacaacacactcttcttcgtcttctatcctgccgcttagtgtgttccgtctgataattcaagtacagccacactcttaagttggtcaaaagaatgctggcttcagttgtaatcaaaactccatcatatttaattgttctaaggaaatcatccacggtagcatatgcaaatcccaaccaagcaatgcaactggattgtgtttcaagcagcagaggagagggaagagacggaagaatcatgttaatttttattccaaacgatctcgcagtacttcaaattgtagatcgcgcagatggcatctatcgcccccactgtgttggtgaaaaagcacagctaaatcaaaagaaatgcgattttcaaggtgctcaacggtggcttccaacaaagcctccacgcgcacatccaaaaacaaaagaataccaaaagaaggagcattttctaactcctcaaacatcatattacattcctgcaccattcccagataattttcagctttccagccttgaattattcgtgtcagttcttgtggtaaatccaaaccacacattacaaacaggtcacggagggcgccctccaccaccattcttaaacacaccctcataatgacaaaatatcttgctcctgtgtcacctgtagcaaattaagaatggcatcatcaattgacatgcccttggctctaagttcttctctaagttctagttgtaaatactctctcatattatcaccaaactgcttagccaaaagccccccgggaacaatagcaggggacgctacagtgcagtacaagcgcagacctccccaattggctccagcaaaaacaagattagaataagcatactgggaaccaccagtaatatcatcaaagttgctggaaatataatcaggcagagtttcttgtaaaaattgaataaaagaaaaattttccaaagaaacattcaaaatctctgggatgcaaatgcaataggttaccgcgctgcgctccaacattgttagttttgaattagtctgcaaaataaaagaaacaagcgtcatatcatagtagcctgtcgaacaggtggataaatcagtctttccatcacaagacaagccacagggtctccagctcgaccctcgtaaaacctgtcatcgtgattaaacaacagcaccgaaagttcctcgcggtggccagcatgaataattcttgatgaagcatataatccagacatgttagcatcagttaaagagaaaaaacagccaacatagcctctgggtataattatgcttaatcttaagtatagcaaagccacccctcgcggatacaaagtaaaaggcacaggagaataaaaaatataattatttctctgccgctgttcaggcaacgtcgcccccggtccatctaaatacacatacaaagcctcatcagccatggcttaccagacaaagaacagcgggcgcacaaagcacaagctctaaagaagctctaaagacactctccaacctctccacaatatatacacaagccctaaactgacgtaatgggagtaaagtataaaaaatcccgccaagcccaacacacaccccgaaactgcgtcagcagggaaaaatacagtttcacttccgcattcccaacaagcgtaagttcctctttctcatggtacgtcacatccgattaacttgcaacgtcattttcccacggtcgcaccgccccttttagccgttaaccccgcagccaatcaccacacagcgcgcacttttttaaattacctcatttgcatattggcaccattccatctataaggtatattatataatagccaagctatttaggtgacactatagaatactcaagctatgcactgagagatcccc

SEQ ID NO: 8 - DNA, 35626 bp, Adenovirus B50
  MISC_FEATURE (1)..(35626): Complete Genome
ctgcaggttaattaaggaagggcgaattctgcagatatccatcacactggcggccgctcgagcatgcatctagagggcccaattcgccctatagtgagtcgtattacaattcactggcccaatcaatataatataccttatagatggaatggtgccaatatgtaaatgaggtaatttaaaaaagtgcgcgctgtgtggtgattggctgcggggtgaacggctaaaaggggcggacatgctgggaggtgacgtgacttatgggggaggagttatgttgcaagttatcgcggtaaaggtgacgtaaaacgaggtgtggtttggacacggaagtagacagttttcccacgcttactgacaggatatgaggtagttttgggcggatgcaagtgaaaattctccattttcgcgcgaaaactgaatgaggaagtgaatttctgagtcatttcgcggttatgacagggtggagtatttgccgagggccgagtagactttgaccgtttacgtggaggtttcgattaccgtgtttttcacctaaatttccgcgtacggtgtcaaagtcctgtgtttttacgtaggtgtcagctgatcgctagggtatttaaacctgtcgagttccgtcaagaggccactcttgagtgccagcgagaagagttttctcctccgcgccgcgagtcagttttgcgctttgaaaatgagacacctgcgattcctgccacaggagattatctccagcgagaccgggatagaaatactggagtttgtggtaaataccctgatgggagatgacccggaaccgccagcgcagcctttcgatccacctacgctgcacgatctgtatgatttagaggtagacgggccggacgatcccaatgaggaagctgtaaatgggttttttactgattctatgctactagctgccgatgaaggattggacataaaccctcctcctgagacccttgataccccaggggtggttgtggaaagcggcagaggtgggataaaattgcctgatctgggagcagctgaaatggacttgcgttgttatgaagagggttttcctccgagtgatgatgaagatggggaaactgaacagtccatccataccgcagtgaatgagggagtaaaagctgccagcgatgtttttaagttggactgtccggagctgcctggacatggctgtaagtcttgtgaatttcacaggaataacactggaatgaaagaactattgtgctcgctttgctatatgagaatgcactgccattttatttacagtaagtgtatttaagtgaaatttaaaggaatagtgtagctgtttaataactgttgaatggtagatttatgtttttacttgtgattttttgtaggtcctgtgtctgatgatgagtcgccttctcctgattcaactacctcacctcctgaaattcaggcgcccgtacctgcaaacgtatgcaagcccattcctgtgaagcctaagtctgggaaacgccctgctgtggataagcttgaggacttgttggagggtggggatggacctttggaccttagtacccggaaactgccaaggcaatgagtgccctgcagctgtgtttatttaatgtgacgtcatgtaataaaattatgtcagctgctgagtgttttattgcttcttgggtggggacttggatatataagtaggagcagatctgtgtggttagcttatagcaacctgctgccatccatggaggtttgggctatcttggaagacctgagacagactaggctactgctagaaaacgcctcggacggagtctctggcttttggagattctggttcggtggtgatctagctaggctagtgtttaggataaaacaggactacagggaagaatttgaaaagttattggacgacagtccaggactttttgaagctcttaacttgggccatcaggctcattttaaggagaaggttttatcagttttagatttttctactcctggtagaactgctgctgctgtagcttttcttacttttatattggataaatggatccgacaaacccacttcagcaagggatacgttttggatttcatagcagcagctttgtggagaacatggaaggctcgcagcatgaggacaatcttagattactggccagtgcagcctctgggagtagcagggatactgagacacccaccgaccatgccagcggttctggaggaggagcagcaggaggacaatccgagagccggcctggaccctccggtggaggagtagctgacctgtttcctgaactgcgacgggtgcttactaggtctacgtccagtggacaggacaggggcattaagagggaaaggaatcctagtgggaataattcaagaaccgagttggctttaagtttaatgagccgtaggcgtcctgaaactgtttggtggcatgaggttcagagcgaaggcagggatgaagtttcaatattgcaggagaaatattcactagaacaacttaagacctgttggttggaacctgaggatgattgggaggtggccattaggaattatgctaagatatctctgaggcctgataaacagtatagaattactaaaaagattaatattagaaatgcatgctacatatcagggaatggggcagaggttataatagatacccaagataaagcagcttttagatgttgtatgatgggtatgtggccaggggttgtcggcatggaagcagtaacatttatgaatattaggtttaaaggggatgggtataatggcattgtatttatggctaacactaagctgattctacatggttgtagcttttttgggtttaataatacttgtgtagaagcttgggggcaagttggtgtgaggggttgtagtttttatgcatgctggattgcaacatcaggtagggtcaagagtcagttgtctgtgaagaaatgcatgtttgagagatgtaatcttggcatactgaatgaaggtgaagcaagggtccgccactgcgcagctacagaaactggctgcttcattctaataaagggaaatgccagtgtgaagcataatatgatctgtggacattcgaatgagaggccttatcagatgctgacttgcgctggtggacattgcaatattcttgctaccgtgcatatcgtttcccatgcacgcaagaaatggcctgtatttgaacataatgtgattaccaagtgcaccatgcacataggtggtcgcaggggaatgtttatgccttaccagtgtaacatgaatcatgtgaaggtgatgttggaaccagatgccttttccagagtgagcttaacaggaatctttgatatgaatattcaactatggaagatactgagatatgatgacactaaaccgagggtgcgcgcatgcgaatgcggaggcaagcatgctagattccagccggtgtgcgtggatgtgactgaagacctgagacccgatcatttggtgcttgcctgcactggagcggagttcggttctagtggtgaagaaactgactaaagtgagtagtggggcaagatgtggatggagactttcaggttggtaaggtggacagattgggtaaattttgttaatttctgtcttgcagctgccatgagtggaagcgcttcttttgaggggggagtatttagcccttatctgacgggcaggctcccatcatgggcaggagttcgtcagaatgtcatgggatccactgtggatgggagacccgtccagcccgccaattcctcaacgctgacctatgccactttgagttcgtcaccattggatgcagctgcagccgccgccgctactgctgccgccaacaccatccttggaatgggctattacggaagcatcgttgccaattccagttcctctaataacccttcaaccctggctgaggacaagctacttgttctcttggctcagctcgaggccttaacccaacgcttaggcgaactgtctaagcaggtggcccagttgcgtgagcaaactgagtctgctgttgccacagcaaagtctaaataaagatctcaaatcaataaataaagaaatacttgttataaaaacaaatgaatgtttatttggtttttcgcgcgcggtatgccctggaccatcggtctcgatcattgagaactcggtggatcttttccagtaccctgtaaaggtgggattgaatgtttagatacatgggcattagtccgtctcgggggtggagatagctccattgaagagcctcttgctccggggtagtgttataaatcacccagtcatagcaaggtcggagtgcatggtgttgcacaatatcttttaggagcagactaattgcaacggggaggcccttagtgtaggtgtttacaaatctgttgagctgggacgggtgcatcctgggggaaattatatgcattttggactggatcttgaggttggcaatgttgccgcctagatcccgtctcgggttcatattgtgcagaaccaccaagacagtgtatccggtgcacttgggaaatttatcatgcagcttagagggaaaagcatgaaaaaatttggagacgcctttgtgaccccccagattctccatgcactcatccataatgatagcgatggggccgtgggcagcggcacgggcgaacacgttccgggggtctgaaacatcatagttatgctcctgagtcaggtcatcataagccattttaataaactttgggcggagggtgccagattgggggatgaaagttccctctggcccgggagcatagtttccctcacatatttgcatttcccaggctttcagttccgagggggggatcatgtccacctgcggggctataaaaaataccgtttctggagccggggtgattaactgggatgagagcaaattcctaagcagctgagacttgccgcacccagtgggaccgtaaatgaccccaattacgggttgcagatggtagtttagggagcgacagctgccgtcctcccggagcaggggggccacttcgttcatcatttcccttacatggatattttcccgcaccaagtccgttaggaggcgctctcccccaagggatagaagctcctggagcgaggagaagtttttcaacggtttcagcccgtcagccatgggcattttggaaagagtctgttgcaagagctcgagccggtcccagagctcggtgatgtgctctatggcatctcgatccagcagacctcctcgtttcgcgggttgggacggctcctggagtagggaatcagacgatgagcgtccagcgctgctagggtccgatccttccatggtcgcagcgtccgagtcagggttgtttccgtcacggtgaaggggtgcgcgcctggttgggcgcttgcgagggtgcgcttcagactcatcctgctggtcgagaaccgctgccgatcggcgccctgcatgtcggccaggtagcagtttaccatgagttcgtagttgagcgcctcggccgcgtggcctttggcacggagcttacctttggaagttttatggcaggcggggcagtagatacatttgagggcatacagcttgggcgcgaggaaaatggattcgggggagtatgcatccgcaccgcaggaggcgcagacggtttcgcactccacgagccaggtcagatccggctcatcggggtcaaaaacaagttttccgccatgttttttgatgcgtttcttacctttggtttccatgagttcgtgtccccgctgggtgacaaagaggctgtccgtgtccccgtagaccgactttatgggcctgtcctcgagcggagtgcctcggtcctcttcgtagaggaacccagcccactctgatacaaaagcgcgtgtccaggccagcacaaaggaggccacgtgggaggggtagcggtcgttgtcaaccagggggtccaccttctctacggtatgtaaacacatgtccccctcctccacatccaagaatgtgattggcttgtaagtgtaggccacgtgaccaggggtccccgccgggggggtataaaagtgggcgggcctctgttcgtcctcactgtcttccggatcactgtccaggagcgccagctgttggggtaggtattctctctcgaaggcgggcatgacctctgcactcaggttgtcagtttctaggaacgaggaggatttgatattgacagtaccagcagagatgcctttcataagactctcgtccatctggtcagaaaacacaatcttcttgttatccagcttggtggcaaatgatccatagagggcattggatagaagcttggcgatggagcgcatggtttggttcttttccttgtccgcgcgctccttggcggcgatgttaagctggacgtactcgcgcgccacacatttccattcagggaagatggttgtcagttcatccggaactattctgactcgccatcccctattgtgcagggttatcagatccacactggtggctacctcgcctcggaggggctcattggtccagcagagtcgacctccttttcttgaacagaaaggggggagggggtctagcatgaactcatcaggggggtccgcatctatggtaaatattcccggtagcaaatctttgtcaaaatagctgatggtggcgggatcatccaaggtcatctgccattctcgaactgccagcgcgcgctcgtaggggttaagaggggtgccccagggcatggggtgggtgagcgcggaggcatacatgccacagatatcgtagacatagaggggctcttcgaggatgccgatgtaagtgggataacagcgcccccctctgatgcttgctcgcacatagtcatagagttcatgtgagggggcgagaagacccgggcccagattggtgcggttgggtttttccgccctgtaaacgatctggcgaaagatggcatgggaattggaagagatagtaggtctctggaatatgttaaaatgggcatgaggtaggcctacagagtcccttatgaagtgggcatatgactcttgcagcttggctaccagctcggcggtgacgagtacgtccagggcacagtagtcgagagtttcctggatgatgtcataacgcggttggcttttcttttcccacagctcgcggttgagaaggtattcttcgcgatccttccagtactcttcgaggggaaacccgtctttttctgcacggtaagagcccaacatgtagaactgattgactgccttgtagggacagcatcccttctccactgggagagagtatgcttgggctgcattgcgcagcgaggtatgagtgagggcaaaagtgtccctgaccatgactttgaggaattgatacttgaagtcgatgtcatcacaggccccctgttcccagagttggaagtccacccgcttcttgtaggcggggttgggcaaagcgaaagtaacatcattgaagaggatcttgccggccctgggcatgaaatttcgggtgattctgaaaggctgagggacctctgctcggttattgataacctgagcggccaagacgatctcatcaaagccattgatgttgtgccccactatgtacagttctaagaatcgaggggtgcccctgacatgaggcagcttcttgagttcttcaaaagtgaggtctgtagggtcagtgagagcatagtgttcgagggcccattcgtgcacgtgagggttcgctttgaggaaggaggaccagaggtccactgccagtgctgtttgtaactggtcccggtactgacgaaaatgctgcccgactgccatcttttctggggtgacgcaatagaaggtttgggggtcctgccgccagcgatcccacttgagttttatggccaggtcataggcgatgttgacgagccgctggtctccagagagtttcatgaccagcatgaaggggattagctgcttgccaaaggaccccatccaggtgtaggtttccacatcgtaggtgaggaagagcctttctgtgcgaggatgagagccaatcgggaagaactggatctcctgccaccagttggaggaatggctgttgatgtgatggaagtagaactccctgcgacgcgccgagcattcatgcttgtgcttgtacagacggccgcagtactcgcatcgattcacgggatgcacctcatgaatgagttgtacctgacttcctttgacgagaaatttcagtggaaaattgaggcctggcgattgtacctcgcgctctactatgttgtctgcatcggcatgaccatcttctgtctcgatggtggtcatgctgacgagccctcgcgggaggcaagtccagacctcggcgcggcaggggcggagctcgaggacgagagcgcgcaggccggagctgtccagggtcctgagacgctgcggagtcaggttagtaggcagtgtcaggagattgacttgcatgatcttttcgagggcgtgagggaggttcagatggtacttgatctccacgggtccgttggtggagatgtcgatggcttgcagggttccgtgccccttgggcgctaccaccgtgcccttgtttttccttttgggcggcggtggctctgttgcttcttgcatgtttagaagcggtgtcgagggcgcgcaccgggcggcaggggcggttcgggacccggcggcatggccggcagtggtacgtcggcgccgcgcgcgggtaggttctggtactgcgccctcagaagactcgcatgcgccacgacgcggcggttgacatcctggatctgacgcctctgggtgaaagctaccggccccgtgagcttgaacctgaaagagagttcaacagaatcaatctcggtatcgttgacggcggcttgcctaaggatttcttgcacgtcgccagagttgtcctggtaggcgatctcggccatgaactgctcgatctcttcctcttgaagatctccgcggcccgctctctcgacggtggccgcgaggtcgttggagatacgcccaatgagttgagagaatgcattcatgcccgcctcgttccagacgcggctgtagaccacagcccccacgggatctctcgcgcgcatgaccacctgggcgaggttgagctccacgtggcgggtgaagaccgcatagttgcataggcgctggaaaaggtagttgagtgtggtggcgatgtgctcggtgacgaagaaatacatgatccatcgtctcagcggcatctcgctgacatcgcccagcgcttccaagcgctccatggcctcgtagaagtccacggcaaagttgaaaaactgggagttacgcgcggacacggtcaactcttcttccaaaagacggatgagttcggcgatggtggtgcgcacctcgagctcgaaagcccctgggatttcttcctcaatctcttcttcttccactaacatctcttcctcttcaggtggggctgcaggaggagggggaacgcggcgacgccggcggcgcacgggcagacggtcgatgaatctttcaatgacctctccgcggcggcggcgcatggtctcggtgacggcacgaccgttctccctgggtctcagagtgaagacgcctccgcgcatctccctgaagtggtgactgggaggctctccgttgggcagggacaccgcgctgattatgcattttattaattgccccgtaggtactccgcgcaaggacctgatcgtctcaagatccacgggatctgaaaacctttcgacgaaagcgtctaaccagtcgcaatcgcaaggtaggctgagcactgtttcttgcgggcgggggcggctagacgctcggtcggggttctctctttcttctccttcctcctctttggagggtgagacgatgctgctggtgatgaaattaaaataggcagttttgagacggcggatggtggcgaggagcaccaggtctttgggtccggcttgttggatgcgcaggcgatgggccattccccaagcattatcctgacatctggccagatctttatagtagtcttgcatgagtcgttccacgggcacttcttcttcgcccgctctgccatgcatgcgagtgatcccgaacccgcgcatgggctggacaagtgccaggtccgctacaaccctttctgcgaggatggcttgctgcacctgggtgagggtggcttggaagtcgtcaaagtccacgaagcggtggtaagccccggtgttgattgtgtaggagcagttggccatgactgaccagttgactgtctggtgcccagggcgcacaagctcggtatacttaaggcgcgagtatgcgcgggtgtcaaagatgtaatcgttacaggtgcgcaccaggtactggtagccgatgagaaagtgcggcggcggctggcggtataggggccatcgctctgtagccggggcgccaggggcgaggtcttccagcatgaggcggtgataaccgtagatgtacctggacatccaggtgataccggaggcggtggtggatgcccgcgggaactcgcgtacgcggttccagatgttgcgcagcggcatgaagtagttcatggtaggcacggtttggcccgtgagacgtgcacagtcgttgatgctctagacatacgggcaaaaacgaaagcggtcagcggctcgtctccgtggcctggaggctaagcgaacgggttgggctgcgcgtgtaccccggttcgaatctcggatcaggctggagccgcagctaacgtggtactggcactcccgtctcgacccaggcctgcacaaaacctccaggatacggaggcgggtcgtttttttttttttttgctttttcctggatgggagccaatgctgcgtcaagctttagaacactcagttctcggggctgggagtggctcgcgcccgtagtctggagaatcaatcgccagggttgcgttgcggtgtgccccggttcgagtcttagcgcgccggatcggccggtttccgcgacaagcgagggtttggcagcctcgtcatttctaagaccccgccagccgacttctccagtttacgggagcgagccctctttttttgtttttttgttgcccagatgcatcccgtgctgcgacagatgcgcccccagcaacagcccccttctcagcagcagctacaacaacagccacaaaaggctcttcctgctcctgtaactactgcggctgcagccgtcagcggcgcggggcagcccgcctatgatctggacttggaagagggcgagggactggcgcgcctgggcgcaccatcgcccgagcggcacccgcgggtgcaactgaaaaaggactctcgcgaggcgtacgtgccccagcagaacctgttcagggacaggagcggcgaggagcctgaggaaatgcgagcttcccgctttaacgcgggtcgcgaactgcgtcacggtctggaccgaagacgggtgctgcgtgatgatgattttgaagtcgatgaagtgacaggaataagtcctgctagggcacatgtggccgcggccaacctagtatcagcttacgagcagaccgtgaaggaggagcgcaactttcaaaaatctttcaacaaccatgtgcgcaccctgattgcccgcgaggaagtgacactgggtctgatgcacctgtgggacctgatggaagccattacccagaaccccaccagcaaacctctaaccgctcagctgtttctggtggtgcaacatagtagagacaatgaggcatttagggaggcgctgttgaacattactgagcccgaggggagatggttgtatgatcttatcaatattctgcaaagtataatcgtgcaagaacgtagcctgggtctagctgagaaggtggctgctattaactactcggtcttgagcctgggcaagcactacgctcgcaagatctacaaaaccccatacgtacctatagacaaggaggtgaagatagatgggttttatatgcgcatgactctcaaggtgctgaccttgagtgacgatctgggagtgtaccgcaacgacaggatgcaccgcgcagtgagcgccagcagaaggcgtgagctgagcgacagagaacttatgcacagcttgcaaagagctctgactggggctggaaccgagggggaaaactactttgacatgggagcggacttgcagtggcagcccagtcgcagggccctggacgcagcagggtatgagcttccttacatagaagaggtggatgaaggccaggatgaggagggcgagtatctggaagactgatggcgcgaccatccatatttttgctagatggaacagcaggcaccggaccccgcaaaacgggcggcgctacagagccagccgtccggcattaactcctcggacgattggagccaggccatgcaacgcatcatggcgctgacgacccgcaaccccgaagcctttagacagcaaccccaggccaaccgcctttctgccatcctggaggccgtagtgccctcccgctccaaccccacacacgagaaggtcctggccatcgtgaacgcgctggtggagaacaaagccatacgtcccgatgaggctgggctggtatacaatgccctattggagcgcgtagcccgttacaacagcagcaacgtgcagaccaacctggaccggatggtgaccgatgtgcgcgaggccgtgtctcagcgcgagcggttccagcgagacgccaatttagggtcgctggtggctttgaacgccttcctcagcactcagcctgccaacgtgcctcgcggtcagcaagactacacaaactttctaagtgcattgagactcatggtggccgaagtccctcaaagcgaagtgtaccagtccgggccagactactttttccagaccagcagacagggcttgcagacagtgaacctgagccaggcttttaagaacctgaatggtctgtggggagtgcgcgccccagtgggagatcgggcgaccgtgtctagcttgctgacccccaactcccgcctactactgctcttggtagccccattcactgacagcggtagcatcgaccgtaattcgtacttgggctatctgttgaacctgtatcgcgaggccatagggcaaactcaggtagatgagcaaacctatcaagaaattacccaagtgagccgcgctctgggtcgggaggacactggcagcttggaagccaccttaaacttcttgctgaccaaccggtcgcagaagatccctcctcagtattcgcttaccgcggaggaggaacggatcctgagatacgtgcagcagagcgtgggactgttcctaatgcaggagggggcgactcctactgctgcgctcgatatgacagcccgaaacatggagcccagcatgtatgccagtaaccggccttttatcaataaactgctagactacttacacagggcggctgctatgaactctgattatttcaccaatgctatcctgaacccccattggctgcccccacctgggttctatacgggcgagtatgacatgcccgaccccaatgacgggtttttatgggacgatgtggacagtagtgttttctccccgcctcctggttataacacttggaagaaggaaggtggcgatagaaggcactcttccgtgtcactgtccggagcaacgggtgctgcagcggctcccgaggccgcaagtcctttccctagtttgccattttcgctaaacagtgtacgcagcagtgagctgggaagaataacccgtcctcgcttgatcggcgaggaggagtatttgaacgactccctgttgagacccgagagggagaagaatttccccaacaacgggatagaaagcttggttgacaaaatgaaccgctggaagacgtacgcgcacgatcacagggacgatccccgggcgctgggggatagccggggcatcgctacccgtaaacgccagtggcacgacaggcagcggggcctggtgtgggccgatgatgattccgccgacgacagcagcgtgttggacttgggtgggagtggtggtaacccgttcgctcacctgcgcccccgcgtcgggcgcctgatgtaagaaaccgaaaataaatactcaccaaggccatggcgaccagcgtgcgttcgtttcttctctgttatagctagtatgatgaggcgaaccgtgctaggcggagcggtggtgtatccggagggtcctcctccttcgtacgagagcgtgatgcagcaggcggcggcggcggcgatgcagccaccactggaggctccctttgtaccccctcggtacctggcacctacggaggggagaaacagcattcgttactcggagctggcaccattgtatgataccacccggttgtatttggtggacaacaagtccgcggacatcgcctcactgaactatcagaacgaccacagcaacttcctcaccacggtggtgcaaaacaatgactttacccccacggaggccagcacccagaccatcaactttgacgagcggtcgcgatggggcggtcagctgaagactatcatgcacaccaacatgcccaacgtgaacgagtacatgtttagcaacaagttcaaagctcgggtgatggtgtctagaaaggctcctgaaggtgtcacagtagatgacaattatgatcacaagcaggatattttggaatatgagtggtttgagtttactctaccggaagggaacttctcagccacaatgaccattgacctaatgaacaatgccatcattgataattaccttgaagtgggcagacagaatggagtgttggagagtgacattggtgttaaatttgacaccaggaactttagactgggttgggatccggaaactaagttgattatgcctggggtttacacctatgaggcattccatcctgacattgtattgttgcctggttgcggagttgactttactgaaagtcgccttagtaacttgcttggtatcaggaaaagacacccattccaggagggttttaagatcttgtatgaggatcttgaagggggtaatatcccggccctgttggatgtagaagcctataagaacagtaagaaagaacgagaagccaaaacagaagccgctaaagctgctgctattgctaaagccaacatagttgtcagcgaccctgtaagggtggctaatgccgaagaagtcagaggagacaactatacagcttcatctgttgcaactgaagaatcgctattggctgctgtggccgaaactacagagaccaaactcactattaaacctgtagaaaaagacagcaagagtagaagttacaatgtcttggaagataaagtgaatacagcctaccgcagctggtacctgtcctacaactatggtgaccctgaaaaaggagtccgttcctggacactgctcaccacctcggatgtcacctgtggagcagagcaggtgtactggtcgctcccagacatgatgcaggaccctgtcacattccgttccacgagacaagtcagcaactatccagtggtaggtgcagagctcatgccggtcttctcaaagagtttctacaacgagcaagccgtgtactcccagcagcttcgccagtccacctcgctcacgcacgtcttcaaccgcttccctgagaaccagatcctcatccgcccgccagcgcccaccattaccaccgtcagtgaaaacgttcctgctctcacagatcacgggaccctgccgttgcgcagcagtatccggggagtccagcgcgtgaccgttactgacgccagacgccgcacctgcccctacgtctacaaggccctgggcatagtcgcgccgcgcgtcctttcaagccgcactttctaaaaaaaaatgtccattcttatctcacctagtaataacaccggttggggcctgcgcgcgccaagcaagatgtacggaggtgctcgcaaacgctctacacagcaccctgtgcgcgtgcgcgggcacttccgcgctccatggggcgccctcaagggtcgtacccgcactagaaccaccgtcgatgatgtgatcgaccaggtggtggccgatgctcgtaattatactcctactgcacctacatctactgtggatgcagttattgacagcgtagtggctgacgcccgcgcctatgctcgccggaagagcaggcggagacgcatcgccaggcgccaccgggctactcccgctatgcgagcggcaagagctctgctgaggagggccaaacgcgtggggcgaagagctatgcttagagcggccagacgcgcggcttcaggtgccagtgccggcaggtcccgcaggcgcgcagccacggcggcagcagcggccattgccaacatggcccaaccgcgaagaggcaatgtgtactgggtgcgcgacgccaccaccggccagcgcgtgcccgtgcgcacccgcccccctcgctcttagaagatactgagcagtctccgatgttgtgtcccagcgaggatgtccaagcgcaaatacaaggaagagatgctccaggtcatcgcgcctgaaatctacggtccgccggtgaaggatgaaaaaaagccccgcaaaatcaagcgggtcaaaaaggacaaaaaggaagaagatggcaatgatggtctggcggagtttgtacgcgagttcgccccaaggcggcgagtgcagtggcgtggacgcaaagtgcagcctgtgctgagacctggaaccacggtggtctttacgcccggcgagcgctccagcactgcttttaagcggtcctatgatgaggtgtatggggatgatgatattctggagcaggcggccgaccgcctgggcgagtttgcttatggcaagcgctcccgctcgagccccaaggaggaggcggtgtccattcccttggacaatgggaatcccacccctagtctcaagccagtcaccctgcagcaagtgctgcccgtgcctccacgcagaggcaacaagcgagagggtgaggatctgtatcccactatgcaattgatggtgcccaagcgccagcggctggaggacgtgctggagaaaatgaaagtggatcccgatatacaacctgaggtcaaagtgagacccatcaagcaggtggcgccaggtttgggagtacaaaccgtagacatcaagattcccaccgagtcaatggaagtccaaaccgaacctgcaaagcccacaaccacctccattgaggtgcaaacggatccctggatgaccgcacccgttacaactccagctgctgtcaacaccactcgaagatcccggcgaaagtacggtccagcaagtttgctgatgccaaattatgctctgcacccatccattattccaactccgggttaccgaggcactcgctactaccgcagcaggagcagcacttcccgccgtcgccgcaaaacacctgcaagtcgtagtcatcgtcgtcgccgccgccccaccagcaatctgactcccgctgctctggtgcggagagtgtatcgcgatggccgcgcggatcccctgacgttaccgcgcgtacgctaccatccaagcatcacaacttaacaactgttgccgctgcctccttgcagatatggccctcacttgccgccttcgtgtccccattactggctaccgaggaagaaactcgcgccgtagaagagggatgttggggcgcggaatgcgacgccacaggcggcggcgcgctatcagcaagaggctggggggtggctttctgcctgctctgatccccatcatagccgcggcgatcggggcgataccaggcatagcttccgtggcggttcaggcctcgcagcgccactgacattggaaaaacttataaataaaacagaatggactctgatgctcctggtcctgtgactatgtttttgtagagatggaagacatcaatttttcatccctggctccgcgacacggcacgaggccgtacatgggcacctggagcgacatcggcaccagccaactgaacgggggcgccttcaattggagcagtatctggagcgggcttaaaaattttggctctaccataaaaacctatgggaacaaagcttggaacagcagcacagggcaggcattgaaaaataagcttaaagagcaaaacttccaacagaaggtggttgatggaatcgcctctggtatcaatggggtggtggatctggccaaccaggccgtgcagaaacagataaacagccgccttgacccgccgccgtcagcccctggtgaaatggaagtggaggaagatctccctccccttgaaaagcggggcgacaagcgtccgcgccccgatctggaggagacactagtcacacgctcagacgacccgccctcctacgaggaggcagtgaagcttggaatgcccaccaccagacctgtagcccccatggctaccggggtaatgaaaccttctcagtcacaccgacccgctaccttggacttgcctccccctgctgttgcagcgcctgctcgcaagcctgtcgctaccccgaagcccaccaccgtacagcccgtcgccgtagccagaccgcgtcctgggggcactccacgtccgaatgcaaactggcagagtactctgaacagcatcgtgggtctgggcgtgcaaagtgtaaagcgccgtcgctgcttttaaattaaatatggagtagcgcttaacttgcctgtctgtgtgtatgtgtcatcatcacgccgccgccgcagcaacagcagaggagcaaggaagaggtcgcgcgccgaggctgagttgatttcaagatggccaccccatcgatgctgccccagtgggcatacatgcacatcgccggacaggatgcttcggagtacctgagtccgggtctggtgcagttcgcccgcgccacagacacctacttcaatctggggaacaagtttaggaaccccaccgtggcgcccacccatgatgtgaccaccgaccgcagtcagcggctgatgctgcgctttgtgcccgttgaccgggaagacaatacctacgcatacaaagttcgatacaccttggctgtgggcgacaacagagtgctggatatggccagcactttctttgacattcggggtgtgttggatagaggtcctagcttcaagccatattctggcactgcttacaactcattggcccctaagggcgctcccaatacatctcagtggcttaataagggagatgaagaggatggggaagacgaccaacaagctacatacacttttggcaatgcgccagtaaaagccgaagctgaaattacaaaagaaggactgccaataggtttggaagttccatctgaaggtggccctaaacccatttatgctgataaactgtatcagccagaacctcaggtgggagaggaatcttggactgatacggatggcacagatgaaaaatatggaggcagagcacttaaacctgaaactaaaatgaaaccctgctacgggtctttcgctaaacctactaatgttaaaggcgggcaggcaaaagtgaagaaagaagaagaaggcaaggttgaatatgacattgacatgaactttttcgacctaagatcacaaatgactggcctcaagcctaaaattgtaatgtatgcagaaaatgtggatctagaaactcctgacactcatgtggtgtacaaacctggagcttcagatgctagctctcatgcaaaccttggtcaacagtccatgcccaatagacctaactatattggcttcagggacaacttcatcggactcatgtactacaacagtactggcaacatgggagtgctggctggacaagcgtctcagctaaatgcagtggttgacttgcaagacagaaacacagaattgtcatatcaactcttgcttgattctctgggggacagaaccagatatttcagtatgtggaatcaagcagtggatagctatgacccagatgtgcgtgttattgagaaccatggtgtggaagatgaacttcctaactattgttttccattggatggtgtaggtccgcgaatagacagttacaagggaattgagacaaatggtgatgaaaccactacttggaaagatttagagccaaagggcataagtgaaattgctaagggaaatccgtttgccatggaaattaacctccaagctaatctctggagaagttttctttattccaatgtggctctgtatctcccagactcctacaaatacaccccagccaatgtcactcttccaactaacaccaacacttatgactacatgaatgggcgggtggttcccccatccctggtggatacctacgtaaacattggcgccagatggtctttggatgccatggacaatgtcaacccctttaaccatcaccgcaacgctggcctgcgataccggtccatgcttttgggcaatggtcgttacgtgcctttccacattcaagtgcctcagaaattctttgctgtgaagaacctgctgcttctacccggttcttacacctacgagtggaacttcagaaaggatgtgaacatggtcctgcagagttcccttggtaatgatctccgggtcgatggtgccagcataagttttaccagcatcaatctctatgccaccttcttccccatggcccacaacactgcctccacccttgaagccatgctgcgcaatgacaccaatgatcaatcattcaatgactacctttctgctgccaacatgctctaccccatcccggccaacgctaccaacgttcccatctccattccctctcgcaactgggccgccttcagaggctggtccttcaccagactcaaaaccaaggagactccctctttgggatcagggttcgatccctactttgtttactctggttctataccctacctggatggtaccttctaccttaaccacactttcaagaaagtctccatcatgtttgactcttcagtgagctggcctggtaatgacagattgctaagtccaaatgagttcgaaatcaagcgcacagttgatggggaaggctacaatgtggcccaatgtaacatgaccaaagactggttcctggtccagatgcttgccaactacaacattggataccagggcttctacgttcctgagggttacaaggatcgcatgtactccttcttcagaaacttccagcccatgagtagacaggtggttgatgagattaactacaaagactataaagctgtcgccgtaccctaccagcataataactctggctttgtgggttacatggctcctaccatgcgtcagggtcaagcgtaccctgctaactacccataccccctaattggaaccactgcagtaaccagtgtcacccagaaaaaattcctgtgcgacaggaccatgtggcgcatcccattctctagcaacttcatgtccatgggtgcccttacagacctgggacagaacttgctgtatgccaactcggcccatgcgctggacatgacttttgaggtggatcccatggatgagcccaccctgctttatcttcttttcgaagtcttcgacgtggtcagagtgcaccagccacaccgcggcgtcatcgaggccgtctacctgcgcacaccgttctcggccggcaacgccaccacataagaagcctcttgcttcttgcaagcagcagctgcagccatgtcatgcgggtccggaaacggctccagcgagcaagagctcaaagccatcgtccgagacctgggctgcggaccctatttcctgggaacctttgacaagcgtttcccggggttcatggcccccgacaagctcgcctgcgccatagtcaacactgccggacgcgagacggggggagagcactggctggcttttggttggaacccgcgctccaacacctgctacctttttgatccttttgggttctcggatgagcgactcaaacagatttaccagtttgagtacgaggggctcctgcgccgcagtgcccttgctaccaaagaccgctgcatcaccctggaaaagtccacccagagcgtgcagggcccgcgctcagccgcctgtggacttttttgctgtatgttccttcatgcctttgtgcactggcccgaccgccccatgaacggaaaccccaccatgaagttgctgactggggtgtcaaacagcatgctccaatcaccccaagtccagcccaccctgcgccgcaaccaggaggcgctatatcgcttcctaaacacccactcatcttactttcgttctcaccgcgcacgcattgaaagggccaccgcgtttgaccgtatggatatgcaataagtcatgtaaaaccgtgttcaataaaaagcattttatttttacatgcactaaggctctggttttttgctcattcgttttcatcattcactcagaaatcaaatgggttctggcgggagtcagagtgacccgtgggcagggagacgttgcggaactgtaacctgttctgccacttgaactcggggatcaccagcttgggaactggaatttcgggaaaggtgtcttgccacaactttctggtcagttgcagggcgccaagcaggtcaggagcagagatcttgaaatcacagttggggccggcattctggacacgggagttgcggtacactgggttgcaacactggaacaccatcaaggctgggtgtctcacgcttgccagcacggtcgggtcactgatggtagtcacatccaagtcttcagcattggccattccaaagggggtcatcttacaggtctgcctgcccatcacgggagcgcagcctggcttgtggttgcaatcgcaatgaatggggatcagcatcatcctggcttggtcgggggttatccctgggtacacggccttcatgaaggcttcgtactgcttgaaagcttcctgagccttacttccctcggtgtaaaacatcccacaggacttgctggaaaattggttagtagcacagttggcatcattcacacagcagcgggcatcgttgttggccaactggaccacatttctgccccagcggttctgggtgatcttggctctgtctgggttctccttcatagcgcgctgcccgttttcgctcgccacatccatctcgataatgtggtccttctggatcatgatagtgccatgcaggcatttcaccttgccttcgtaatcggtgcatccatgagcccacagagcgcacccggtgcactcccaattattgtgggcgatctcagaataagaatgcaccaatccctgcatgaatcttcccatcatcgctgtcagggtcttcatgctactaaatgtcagcgggatgccacggtgctcctcgttcacatactggtggcagatacgcttgtactgctcgtgctgctctggcatcagcttgaaagaggttctcaggtcattatccagcctatacctctccattagcacagccatcacttccatgcccttctcccaggcagataccaggggcaagctcaaaggattcctaacagcaatagaagtagctcctttagctatagggtcattcttgtcgatcttctcaacacttctcttgccatccttctcaatgatgcgcaccggggggtagctgaagcccacggccaccaactgagcctgttctctttcttcttcgctgtcctggctgatgtcttgcagagggacatgcttggtcttcctgggcttcttcttgggagggatcgggggaggactgttgctccgttccggagacagggatgaccgcgaagtttcgcttaccagtaccacctggctctcgatagaagaatcggaccccacgcgacggtaggtgttcctcttcgggggcagaggtggaggcgactgagatgggctgcggtccggccttggaggcggatggctggcagagcccattccgcgttcgggggtgtgctcccgttggcggtcgcttgactgatttcctccgcggctggccattgtgttctcctaggcagagaaacaacagacatggaaactcagccatcactgccaacatcgctgcaagcgccatcacacctcgcccccagcagcgacgaggaggagagcttaaccaccccaccacccagtcccgctaccaccacctctaccctcgatgatgaggaggaggtcgacgcagcccaggagatgcaggcgcaggataatgtgaaagcggaagagattgaggcagatgtcgagcaggacccgggctatgtgacaccggcggagcacgaggaggagctgaaacgttttctagacagagaggatgacgaccgcccagagcatcaccaggaggctggcctcggggatcatgttgccgactacctctccgggcttgggagggaggacgtgctcctcaaacatctagcaaggcagtcgatcatagttaaagacgcactactcaacctcaccgaagtgcctatcagtgtggaagagcttagccgcgcctacgagctgaacctcttttcgcctcagataccccccaagcggcagcgaaacggcacctgcgaggccaaccctcgactcaacttctatccagcttttactgtccccgaagtgctggccacctaccacatcttttttaagaaccaaaagattccagtctcctgccgcgccaaccgcacccgcgcagatgcccttctcaacttgggtccgggagctcgcttacctgatatagcttccttggaagaggttccaaagatctttgagggtctgggaagtgatgagactcgggccgcaaatgctctgcaacagggagagaatggtatggatgaacatcacagcgctctagtggaactggagggtgacaatgcccggcttgcagtgctcaagcgcagtatcgtggtcacccattttgcctaccccgctgttaacctgccgcccaaagtcatgagcgctgtcatggaccatctgctcatcaaacgagcaagtccactttcagaaaaccagaacatgcaggatccagacgcctcggaggagggcaagccggtagtcagtgacgagcagctatctcgctggctgggtaccaactccccccgagatttggaagaaagacgcaagcttatgatggctgtagtgctagtaactgttgagttggagtgtctgcgccgcttttttaccgaccccgagaccctgcgcaagctagaggagaacctgcactacaccttcagacatggcttcgtgcgccaggcatgcaagatctccaacgtggagctcaccaacctggtttcatacatgggcattttgcatgagaaccggctagggcagagcgttctgcacaccaccctgaagggggaggcccgccgcgactacatccgagactgtgtctacctctacctctgccatacctggcagactggtatgggtgtgtggcaacagtgtttggaagagcagaaccttaaagagctggacaagctcttgcagagatccctcaaagccctgtggacaggttttgacgagcgcaccgtcgcctcggacctggcggacatcatcttccccgagcgtcttagggttactctgcgaaacggcctgccagacttcatgagccagagcatgcttaacaactttcgctctttcatcctggaacgctccggtatcctgcctgccacctgctgtgcgctgccctccgactttgtgcctctcacctaccgcgagtgcccaccgccgctatggagccactgctacctattccgcctggccaactacctctcctaccactcggatgtgatagaggatgtgagcggagacggcctgctggaatgccactgccgatgcaatttatgcacaccccaccgctccctcgcctgcaacccccagttgctaagcgagacccagatcatcggcaccttcgagttgcagggtcccaacagtgaaggcgaggggtcttctccggggcagagtctgaaactgacaccggggctgtggacctccgcctacctgcgcaagtttcatcccgaggactatcatccctatgagatcaggttctatgaggaccagtcacatcctcccaaagtcgagctctcagcctgcgtcatcacccagggggcaattctggcccaattgcaagccatccaaaaatcccgccaagaatttctgctgaaaaagggaagcggggtctaccttgacccccagaccggtgaggagctcaacacaaggttcccccaggatgtcccatcgccgaggaagcaagaagctgaaggtgcagctgtcacccccagaggatatggaggaagactgggacagtcaggcagaggaggagatggaagattgggacagccaggcagaggaggtggacagcctggaggaagacagtttggaggaggaagacgaggaggcagaggaggtggaagaagcaaccgccgccaaacagttgtcatcggcggcggagacaagcaagtccccagacagcagcacggctaccatctccgctccgggtcggggggcccagcggcggcccaacagtagatgggacgagaccgggcgatttccaaacccgaccaccgcttccaagaccggtaagaaggagcgacagggatacaagtcctggcgtggacataaaaacgctatcatctcctgcttgcatgaatgcgggggcaacatatccttcacccggcgatacctgcttttccaccacggtgtgaacttcccccgcaatatcttgcattactaccgtcacctccacagcccctactgcagtcagcaagtcccggcaaccccgacagaaaaagacagcagcgacaacggtgaccagaaaagcagcagttagaaaatccacaacaagtgcagcaggaggaggactgaggatcacagcgaacgagccagcgcagaccagagagctgaggaaccggatctttccaaccctctatgccatcttccagcagagtcgggggcaagagcaggaattgaaagtaaaaaaccgatctctgcgctcgctcaccagaagttgtttgtatcacaagagcgaagaccaacttcagcgcactctcgaggacgccgaggctctcttcaacaagtactgcgcgctgactcttaaagagtagcccttgcccgcgctcattcgaaaacggcgggaatcacgtcacccttggcagctgtcctttgccctcgtcatgagtaaagagattcccacgccttacatgtggagctatcagccccaaatggggttggcagcaggtgcttcccaggactactccacccgcatgaattggcttagcgccgggccctcaatgatatcacgggttaatgatatacgagcttatcgaaaccagttactcctagaacagtcagctcttaccaccacaccccgccaacaccttaatccccgaaattggcccgccgccctggtgtaccaggaaaatcccgctcccaccaccgtactacttcctcgagacgcccaggccgaagttcagatgactaacgcaggtgtacagctggcgggcggttccgccctatgtcgtcaccggcctcaacagagtataaaacgcctggtgatcagaggccgaggtatccagctcaacgacgagtcggttagctcttcgcttggtctgcgaccagacggagtcttccagatcgccggctgtgggagatcttccttcactcctcgtcaggctgtgctgactttggagagttcgtcctcgcagccccgctcgggcggcatcggaactctccagtttgtggaggagtttactccctctgtctacttcaaccccttctccggctctcctggccagtacccggacgagttcataccgaacttcgacgcaatcagcgagtcagtggatggctatgattgatgtctaatggtggcgcggctgagctagctcgactgcgacacctagaccactgccgccgctttcgctgtttcgcccgggaactcaccgagttcatctacttcgaactctccgaggagcaccctcagggtccggcccacggagtgcggattaccatcgaagggggaatagactctcgcctgcatcgcatcttctcccagcggcccgtgctgattgagcgcgaccagggaaatacaaccatctccatctactgcatctgtaaccaccccggattgcatgaaagcctttgctgtcttgtttgtgctgagtttaataaaaactgagttaagaccttcctacggactaccgcttcttcaatcaggactttacaacaccaaccagatcttccagaagacccagacccttcctcctctgatccaggactctaactctaccttaccagcaccctccactactaaccttcccgaaactaacaagcttggatctcatctgcaacaccgcctttcacgaagccttctttctgccaatactaccactcccaaaaccggaggtgagctccgcggtcttcctactgacgacccctgggtggtagcgggttttgtaacgttaggattagttgcgggtgggcttgtgctaatcctttgctacctatacacaccttgctgtgcatatttagtcatattgtgctgttggtttaagaaatgggggccatactagtcgtgcttgctttactttcgcttttgggtctgggctctgctaatctcaatcctcttgatcacaatccatgtctagacttcgacccagaaaattgcacacttacttttgcacccgacacaagccgtctctgtggagttcttattaagtgcggatgggactgcaggtccgttgaaattacacataataacaaaacatggaacaataccttatccaccacatgggagccaggagttcccgagtggtatactgtctctgtccgaggtcctgacggttccattcgcattagtaacaacactttcattttttctgaaatgtgcgatctggccatgtttatgagcaaacagtatgacctatggcctcctagcaaagagaacattgtggcattttccattgcttattgcttggtaacatgcatcatcactgctatcatttgtgtgtgcatacacttgcttatagttattcgccctagacaaagcaatgaggaaaaagagaaaatgccttaacctttttcctcataccttttctttacagcatggcttctgttacagctctaattattgccagcattgtcactgtcgctcacgggcaaacaattgtccatattaccttaggacataatcacactcttgtagggcccccaattacttcagaggttatttggaccaaacttggaagtgttgattattttgatataatttgcaacaaaactgaaccaatatttgtaatctgtaacagacaaaatctcacgttaattaatgttagcaaaatttataacggttactattatggttatgatagatccagtagccaatataaaaattacttagttcgcataactcagcccaaatcaacagtgccaactatgacaataattaaaatggctaataaagcattagaaaattttacattaccaacaacgcccaatgaaaaaaacattccaaattcaatgattgcaattattgcggcggtggcattgggaatggcactaataataatatgcatgttcctatatgcttgttgctataaaaagtttcaacataaacaggatccactactaaattttaacatttaattttttatacagatgatttccactacaatttttatcattactagccttgcagctgtaacttatggccgttcacacctaactgtacctgttggctcaacatgtacactacaaggaccccaagaaggctatgtcacttggtggagaatatatgataatggagggttcgctagaccatgtgatcagcctggtacaaaattttcatgcaacggaagagacttgaccattattaacataacattaaatgagcaaggcttctattatggaaccaactataaaaatagtttagattacaacattattgtagtgccagccaccacttctgctccccgcaaatccactttctctagcagcagtgccaaagcaagcacaattcctaaaacagcttctgctatgttaaagcttcgaaaaatcgctttaagtaattccacagcagctcccaatacaattcctaaatcaacaattggcatcattactgccgtggtagtgggattaatgattatatttttgtgcataatgtactacgcctgctgctatagaaaacatgaacaaaaaggtgatgcattactaaattttgatatttaattttttatagaattatgatattgtttcaatccaatgccactaacactatcaatgtgcagactactttaaaacatgacatggaaaaccacactacctcctatgcatacacaaatattcagcctaaatacgctatgcaactagaaatcaccatactaattgtaattggaattcttatactatctgttattctttattttatattctgccgtcaaatacccaatgttcatagaaattctaaaagacgtcccatctattctcctatgattagtcgtccccatatggctctgaatgaaatctaagatctttttttttcttttacagtatggtgaacatcaatcatgattcctagaaatttcttcttcaccatactcatctgtgctttcaatgtctgtgctactttcacagcagtagccactgcaagcccagactgtataggaccatttgcttcctatgcactttttgcctttgttacttgcatctgcgtgtgtagcatagtctgcctggttattaattttttccaactggtagactggatctttgtgcgaattgcctacctacgtcaccatcccgaataccgcaatcaaaatgttgcggcacttcttaggcttatttaaaaccatgcaggctatgctaccagttattttaattctgctactaccctgcattgccctaccttccaccgccactcgcgctacacctgaacaacttagaaaatgcaaatttcaacaaccatggtcatttcttgattgctaccatgaaaaatctgattttcccacatactggatagtgattgttggaataattaacatactttcatgtacctttttctcaatcacaatataccccacatttaattttgggtggaattctcccaatgcactgggttacccacaagagctagatgaacatatcccactacaacacatacaacaaccactagcattggtagagtatgaaaatgagccacaaccttcactgcctcctgctattagttacttcaacctaaccggcggagatgactgaaatactcaccacctccaattccgccgaggatctgcttgatatggacggccgcgcctcagaacagcgactcgcccaactacgcatccgccagcagcaggaacgcgtgaccaaagagctcagagatgtcatccaaattcaccaatgcaaaaaaggcatattttgtttggtaaaacaagccaagatatcctacgagatcaccgctactgaccatcgcctctcttacgaacttggcccccaacgacaaaaatttacatgcatggtgggaatcaaccctatagttatcacccagcaaagtggagatactaagggttgcattcactgctcttgcgattccaccgagtgcacctacaccctgctgaagaccctatgcggcctaagagacctgctacccatgaattaaaaattaataaaaaattacttacttgaaatcagcaataaggtctctgttgaaattttttcccagcagcacctcgcttccctcttcccaactctggtattctaaaccccgttcagcggcatactttctccatactttaaaggggatgtcaaattttagctcctctcctgtacccacgatcttcatgtctttcttcccagatgaccaagagagtccggctcagtgattccttcaaccctgtctacccctatgaagacgaaagcacctcccaacacccctttataaacccagggtttatttccccaaatggctttacacaaagcccagacggagttcttactttaaattgtttaaccccactaacaaccacaggcgggcctttacagttaaaagtgggagggggacttatagtggatgacactgatgggaccttacaagaaaacatacgtgttacagcacccattactaaaaataatcattctgtagaactatccattggaaatggattagaaacacaaaacaataaactatgtgccaaattgggaaatgggttaaaatttaacaacggtgacatttgtataaaggatagtattaacaccttatggactggaataaagcctccacctaactgtcaaatagtggaaaacactgatacaaacgatggcaaacttactttagtattagtaaaaaacggaggacttgttaatggctacgtatctctagttggtgtatcagacactgtgaaccaaatgttcacacaaaagtcagcaaccatacaattaagattatatttcgactcttctggaaatctattaactgatgaatcaaacttaaaaattccacttaaaaataaatcttctacagcaaccagtgaagctgcaaccagcagcaaagcctttatgccaagtactacagcttatccctttaacaccactactagggatagtgaaaactatattcatggaatatgttactatatgactagttatgatagaagtctagttcccttaaacatttctataatgctaaacagccgtacgatttcttccaatgttgcctatgccatacaatttgaatggaatctaaatgcaaaagaatctccagaaagcaacatagctacgctgaccacatccccctttttcttttcttatattagagaagacgacaactaaaaaataaagtttaagtgtttttatttaaaaatcacaaaattcgagtagttattttgcctcccccttcccatttaacagaatacaccaatctctccccacgcacagctttaaacatttggataccattagagatagacatagttttagtttccacattccaaacagtttcagagcgagccaatctggggtcagtgatacataaaaatgcatcgggatagtcttttaaagcgctttcacagtccaactgctgcggatgcgactccggagtctggatcacagtcatctggaagaagaacgatgggaatcataatccgaaaacggaatcgggcgattgtgtctcatcaaacccacaagcagccgctgtctgcgtcgctccgtgcgactgctgtttatgggatcggggtctgcagtgtcctgaagcatgattttaatagcccttaacattaactttctggtgcgatgcgcgcagcaacgcattctgatttcactgagattactacagtatgtacagcacattatcacaatattgtttaataaaccataattaaaagcgctccagccaaaactcatatctgatacaatcgcccctgcatgaccatcataccaaattttaatataaattaaatgtcgttccctcaaaaacacactacccacatacatgatctcttttggcatgtgcatattaacaatctgtctgtaccatggacaacgttggttaatcatgcaacccaatataaccttccggaaccacactgccaacaccgctcccccagccatgcattgaagtgaaccctgctgattacaatgacaatgaagaacccaattctctcgaccatgaatcacttgagactgaaaaatatctatagtagcacaacaaagacataaatgcatgcatcttctcataatttttaactcatctggatttaaaaacatatcccaaggaatgggaaactcttgcaaaacagtaaagctggcagaacaaggaagaccacgaacacaacttacactatgcatagtcatagtatcacaatctggcaacagcgggtggtcttcagtcatagaagctcgggtttcattttcctcacatcgtggtaactgggctctggtgtaagggtgatgtctggcgcatgatgtcgagcgtgcgcgcaaccttgtcataatggagttgtttcctgacattctcgtattttgtatagcaaaacgcggccctggcacaacacactcttcttcgtcttctatcctgccgcttagtgtgttccgtctgataattcaagtacagccacactcttaagttggtcaaaagaatgctggcttcagttgtaatcaaaactccatcatatttaattgttctaaggaaatcatccacggtagcatatgcaaatcccaaccaagcaatgcaactggattgcgtttcaagcagcagaggagagggaagagacggaagaatcatgttaatttttattccaaacgatctcgcagtacttcaaattgtagatcgcgcagatggcatctatcgcccccactgtgttggtgaaaaagcacagctaaatcaaaagaaatgcgattttcaaggtgctcaacggtggcttccaacaaagcctccacgcgcacatccaaaaacaaaagaataccaaaagaaggagcattttctaactcctcaaacatcatattacattcctgcaccattcccagataattttcagctttccagccttgaattattcgtgtcagttcttgtggtaaatccaaaccacacattacaaacaggtcccggagggcgccctccaccaccattcttaaacacaccctcataatgacaaaatatcttgctcctgtgtcacctgtagcaaattaagaatggcatcatcaattgacatgcccttggctctaagttcttctctaagttctagttgtaaatactctctcatattatcaccaaactgcttagccaaaagccccccgggaacaatagcaggggacgctacagtgcagtacaagcgcagacctccccaattggctccagcaaaaacaagattagaataagcatactgggaaccaccagtaatatcatcaaagttgctggaaatataatcaggcagaatttcttgtaaaaattgaataaaagaaaaattttccaaagaaacattcaaaatctctgggatgcaaatgcaataggttaccgcgctgcgctccaacattgttagttttgaattagtctgcaaaataaaagaaacaagcgtcatatcatagtagcctgtcgaacaggtggataaatcagtctttccatcacaagacaagccacagggtctccagctcgaccctcgtaaaacctgtcatcgtgattaaacaacagcaccgaaagttcctcgcggtggccagcatgaataattcttgatgaagcatataatccagacatgttagcatcagttaaagagaaaaaacagccaacatagcctctgggtataattatgcttaatcttaagtatagcaaagccacccctcgcggatacaaagtaaaaggcacaggagaataaaaaatataattatttctctgctgctgttcaggcaacgtcgcccccggtccatctaaatacacatacaaagcctcatcagccatggcttaccagacaaagtacagcgggcgcacaaagcacaagctctaaagaagctctaaagacactcttcaacctctccacaatatatacacaagccctaaactgacgtaatgggagtaaagtgtaaaaaatcccgccaagcccaacacacaccccgaaactgcgtcagcagggaaaagtacagtttcacttccgcattcccaacaagcgtaagttcctctttctcatggtacgtcacatccgattaacttgcaacgtcattttcccacggtcgcaccgccccttttagccgttcaccccgcagccaatcaccacacagcgcgcacttttttaaattacctcatttacatattggcaccattccatcgataaggtatatcatattgattggccaagctatttaggtgacactatagaatactcaagctatgcatcaagcttggtaccgagctcggatccactagtaacggccgccagtgtgctggaattcgcccttgtttaaacgcgatcg

SEQ ID NO: 9 - DNA, 35417 bp, Adenovirus B11
  MISC_FEATURE (1)..(35417): Complete Genome
cgatcgcgtttaaacaagggcgaattccagcacactggcggccgttactagtggatccgagctcggtaccaagcttgatgcatagcttgagtattctatagtgtcacctaaatagcttggccatcatcaataatataccttatagatggaatggtgccaatatgtaaatgaggtgattttaaaaagtgtggatcgtgtggtgattggctgtggggttaacggctaaaaggggcggtgcgaccgtgggaaaatgacgttttgtgggggtggagtttttttgcaagttgtcgcgggaaatgtgacgcataaaaaggcttttttctcacggaactacttagttttcccacggtatttaacaggaaatgaggtagttttgaccggatgcaagtgaaaattgttgattttcgcgcgaaaactgaatgaggaagtgtttttctgaataatgtggtatttatggcagggtggagtatttgttcagggccaggtagactttgacccattacgtggaggtttcgattaccgtgttttttacctgaatttccgcgtaccgtgtcaaagtcttctgtttttacgtaggtgtcagctgatcgctagggtatttatacctcagggtttgtgtcaagaggccactcttgagtgccagcgagaagagttttctcctctgcgccggcagtttaataataaaaaaatgagagatttgcgatttctgcctcaggaaataatctctgctgagactggaaatgaaatattggagcttgtggtgcacgccctgatgggagacgatccggagccacctgtgcagctttttgagcctcctacgcttcaggaactgtatgatttagaggtagagggatcggaggattctaatgaggaagctgtaaatggcttttttaccgattctatgcttttagctgctaatgaagggttagaattagatccgcctttggacacttttgatactccaggggtaattgtggaaagcggtacaggtgtaagaaaattacctgatttgagttccgtggactgtgatttgcactgctatgaagacgggtttcctccgagtgatgaggaggaccatgaaaaggagcagtccatgcagactgcagcgggtgagggagtgaaggctgccaatgttggttttcagttggattgcccggagcttcctggacatggctgtaagtcttgtgaatttcacaggaaaaatactggagtaaaggaactgttatgttcgctttgttatatgagaacgcactgccactttatttacagtaagtgtgtttaagttaaaatttaaaggaatatgctgtttttcacatgtatattgagtgtgagttttgtgcttcttattataggtcctgtgtctgatgctgatgaatcaccatctcctgattctactacctcacctcctgagattcaagcacctgttcctgtggacgtgcgcaagcccattcctgtgaagcttaagcctgggaaacgtccagcagtggaaaaacttgaggacttgttacagggtggggacggacctttggacttgagtacacggaaacgtccaagacaataagtgttccatatccgtgtttacttaaggtgacgtcaatatttgtgtgacagtgcaatgtaataaaaatatgttaactgttcactggtttttattgctttttgggcggggactcaggtatataagtagaagcagacctgtgtggttagctcataggagctggctttcatccatggaggtttgggccattttggaagaccttaggaagactaggcaactgttagagaacgcttcggacggagtctccggtttttggagattctggttcgctagtgaattagctagggtagtttttaggataaaacaggactataaacaagaatttgaaaagttgttggtagattgcccaggactttttgaagctcttaatttgggccatcaggttcactttaaagaaaaagttttatcagttttagacttttcaaccccaggtagaactgctgctgctgtggcttttcttacttttatattagataaatggatcccgcagactcatttcagcaggggatacgttttggatttcatagccacagcattgtggagaacatggaaggttcgcaagatgaggacaatcttaggttactggccagtgcagcctttgggtgtagcgggaatcctgaggcatccaccggtcatgccagcggttctggaggaggaacagcaagaggacaacccgagagccggcctggaccctccagtggaggaggcggagtagctgacttgtctcctgaactgcaacgggtgcttactggatctacgtccactggacgggataggggcgttaagagggagagggcatctagtggtactgatgctagatctgagttggctttaagtttaatgagtcgcagacgtcctgaaaccatttggtggcatgaggttcagaaagagggaagggatgaagtttctgtattgcaggagaaatattcactggaacaggtgaaaacatgttggttggagcctgaggatgattgggaggtggccattaaaaattatgccaagatagctttgaggcctgataaacagtataagattactagacggattaatatccggaatgcttgttacatatctggaaatggggctgaggtggtaatagatactcaagacaaggcagttattagatgctgcatgatggatatgtggcctggggtagtcggtatggaagcagtaacttttgtaaatgttaagtttaggggagatggttataatggaatagtgtttatggccaataccaaacttatattgcatggttgtagcttttttggtttcaacaatacctgtgtagatgcctggggacaggttagtgtacggggatgtagtttctatgcgtgttggattgccacagctggcagaaccaagagtcaattgtctctgaagaaatgcatatttcaaagatgtaacctgggcattctgaatgaaggcgaagcaagggtccgccactgcgcttctacagatactggatgttttattttgattaagggaaatgccagcgtaaagcataacatgatttgcggtgcttccgatgagaggccttatcaaatgctcacttgtgctggtgggcattgtaatatgctggctactgtgcatattgtttcccatcaacgcaaaaaatggcctgtttttgatcacaatgtgatgacgaagtgtaccatgcatgcaggtgggcgtagaggaatgtttatgccttaccagtgtaacatgaatcatgtgaaagtgttgttggaaccagatgccttttccagaatgagcctaacaggaatttttgacatgaacatgcaaatctggaagatcctgaggtatgatgatacgagatcgagggtacgcgcatgcgaatgcggaggcaagcatgccaggttccagccggtgtgtgtagatgtgactgaagatctcagaccggatcatttggttattgcccgcactggagcagagttcggatccagtggagaagaaactgactaaggtgagtattgggaaaactttggggtgggattttcagatggacagattgagtaaaaatttgttttttctgtcttgcagctgtcatgagtggaaacgcttcttttaaggggggagtcttcagcccttatctgacagggcgtctcccatcctgggcaggagttcgtcagaatgttatgggatctactgtggatggaagacccgtccaacccgccaattcttcaacgctgacctatgctactttaagttcttcacctttggacgcagctgcagctgccgccgccgcttctgttgccgctaacactgtgcttggaatgggttactatggaagcatcatggctaattccacttcctctaataacccttctaccctgactcaggacaagttacttgtccttttggcccagctggaggctttgacccaacgtctgggtgaactttctcagcaggtggtcgagttgcgagtacaaactgagtctgctgtcggcacggcaaagtctaaataaaaaaatcccagaatcaatgaataaataaacaagcttgttgttgatttaaaatcaagtgtttttatttcatttttcgcgcacggtatgccctagaccaccgatctctatcattgagaactcggtggattttttccaggatcctatagaggtgggattgaatgtttagatacatgggcattaggccgtctttggggtggagatagctccattgaagggattcatgctccggggtagtgttgtaaatcacccagtcataacaaggtcgcagtgcatggtgttgcacaatatcttttagaagtaggctgattgccacagataagcccttggtgtaggtgtttacaaaccggttgagctgggatgggtgcattcggggtgaaattatgtgcattttggattggatttttaagttggcaatattgccgccaagatcccgtcttgggttcatgttatgaaggaccaccaagacggtgtatccggtacatttaggaaatttatcgtgcagcttggatggaaaagcgtggaaaaatttggagacacccttgtgtcctccaagattttccatgcactcatccatgataatagcaatggggccgtgggcagcggcgcgggcaaacacgttccgtgggtctgacacatcatagttatgttcctgagttaaatcatcataagccattttaatgaatttggggcggagagtaccagattggggtatgaatgttccttcgggccccggagcatagttcccctcacagatttgcatttcccaagctttcagttccgagggtggaatcatgtccacctggggggctatgaaaaacaccgtttctggggcgggggtgattaattgtgatgatagcaaatttctgagcaattgagatttgccacatccggtggggccataaatgattccgattacgggttgcaggtggtagtttagggaacggcaactgccgtcttctcgaagcaagggggccacctcgttcatcatttcccttacatgcatattttcccgcaccaaatccattaggaggcgctctcctcctagtgatagaagttcttgtagtgaggaaaagtttttcagcggtttcagaccgtcagccatgggcattttggagagagtttgctgcaaaagttctagtctgttccacagttcagtgatgtgttctatggcatctcgatccagcagacctcctcgtttcgcgggtttggacggctcctggaatagggtatgagacgatgggcgtccagcgctgccagggttcggtccttccagggtctcagtgttcgagtcagggttgtttccgtcacagtgaaggggtgtgcgcctgcttgggcgcttgccagggtgcgcttcagactcatcctgctggtcgaaaacttctgtcgcttggcgccctgtatgtcggccaagtagcagtttaccatgagttcgtagttgagcgcctcggctgcgtggcctttggcgcggagcttacctttggaagttttcttgcataccgggcagtataggcatttcagcgcatacaacttgggcgcaaggaaaacggattctggggagtatgcatctgcgccgcaggaggcgcaaacagtttcacattccaccagccaggttaaatccggttcattggggtcaaaaacaagttttccgccatattttttgatgcgtttcttacctttggtctccatgagttcgtgtcctcgttgagtgacaaacaggctgtccgtgtccccgtagactgattttacaggcctcttctccagtggagtgcctcggtcttcttcgtacaggaactctgaccactctgatacaaaggcgcgcgtccaggccagcacaaaggaggctatgtgggaggggtagcgatcgttgtcaaccagggggtccaccttttccaaagtatgcaaacacatgtcaccctcttcaacatccaggaatgtgattggcttgtaggtgtatttcacgtgacctggggtccccgctgggggggtataaaagggggcggttctttgctcttcctcactgtcttccggatcgctgtccaggaacgtcagctgttggggtaggtattccctctcgaaggcgggcatgacctctgcactcaggttgtcagtttctaagaacgaggaggatttgatattgacagtgccggttgagatgcctttcatgaggttttcgtccatttggtcagaaaacacaatttttttattgtcaagtttggtggcaaatgatccatacagggcgttggataaaagtttggcaatggatcgcatggtttggttcttttccttgtccgcgcgctctttggcggcgatgttgagttggacatactcgcgtgccaggcacttccattcggggaagatagttgttaattcatctggcacgattctcacttgccaccctcgattatgcaaggtaattaaatccacactggtggccacctcgcctcgaaggggttcattggtccaacagagcctacctcctttcctagaacagaaagggggaagtgggtctagcataagttcatcgggagggtctgcatccatggtaaagattcccggaagtaaatccttatcaaaatagctgatgggagtggggtcatctaaggccatttgccattctcgagctgccagtgcgcgctcatatgggttaaggggactgccccatggcatgggatgggtgagtgcagaggcatacatgccacagatgtcatagacgtagatgggatcctcaaagatgcctatgtaggttggatagcatcgcccccctctgatacttgctcgcacatagtcatatagttcatgtgatggcgctagcagccccggacccaagttggtgcgattgggtttttctgttctgtagacgatctggcgaaagatggcgtgagaattggaagagatggtgggtctttgaaaaatgttgaaatgggcatgaggtagacctacagagtctctgacaaagtgggcataagattcttgaagcttggttaccagttcggcggtgacaagtacgtctagggcgcagtagtcaagtgtttcttgaatgatgtcataacctggttggtttttcttttcccacagttcgcggttgagaaggtattcttcgcgatccttccagtactcttctagcggaaacccgtctttgtctgcacggtaagatcctagcatgtagaactgattaactgccttgtaagggcagcagcccttctctacgggtagagagtatgcttgagcagcttttcgtagcgaagcgtgagtaagggcaaaggtgtctctgaccatgactttgagaaattggtatttgaagtcgatgtcgtcacaggctccctgttcccagagttggaagtctacccgtttcttgtaggcggggttgggcaaagcgaaagtaacatcattgaagagaatcttaccggctctgggcataaaattgcgagtgatgcgaaaaggctgtggtacttccgctcgattgttgatcacctgggcagctaggacgatctcgtcgaaaccgttgatgttgtgtcctacgatgtataattctatgaaacgcggcgtgcctctgacgtgaggtagcttactgagctcatcaaaggttaggtctgtggggtcagataaggcgtagtgttcgagagcccattcgtgcaggtgaggatttgcatgtaggaatgatgaccaaagatctaccgccagtgctgtttgtaactggtcccgatactgacgaaaatgccggccaattgccattttttctggagtgacacagtagaaggttctggggtcttgttgccatcgatcccacttgagtttaatggctagatcgtgggccatgttgacgagacgctcttctcctgagagtttcatgaccagcatgaaaggaactagttgtttgccaaaggatcccatccaggtgtaagtttccacatcgtaggtcaggaagagtctttctgtgcgaggatgagagccgatcgggaagaactggatttcctgccaccagttggaggattggctgttgatgtgatggaagtagaagtttctgcggcgcgccgagcattcgtgtttgtgcttgtacagacggccgcagtagtcgcagcgttgcacgggttgtatctcgtgaatgagttgtacctggcttcccttgacgagaaatttcagtgggaagccgaggcctggcgattgtatctcgtgctcttctatattcgctgtatcggcctgttcatcttctgtttcgatggtggtcatgctgacgagcccccgcgggaggcaagtccagacctcggcgcgggaggggcggagctgaaggacgagagcgcgcaggctggagctgtccagagtcctgagacgctgcggactcaggttagtaggtagggacagaagattaacttgcatgatcttttccagggcgtgcgggaggttcagatggtacttgatttccacaggttcgtttgtagagacgtcaatggcttgcagggttccgtgtcctttgggcgccactaccgtacctttgttttttcttttgatcggtggtggctctcttgcttcttgcatgctcagaagcggtgacggggacgcgcgccgggcggcagcggttgttccggacccgagggcatggctggtagtggcacgtcggcgccgcgcacgggcaggttctggtactgcgctctgagaagacttgcgtgcgccaccacgcgtcgattgacgtcttgtatctgacgtctctgggtgaaagctaccggccccgtgagcttgaacctgaaagagagttcaacagaatcaatttcggtatcgttaacggcagcttgtctcagtatttcttgtacgtcaccagagttgtcctggtaggcgatctccgccatgaactgctcgatttcttcctcctgaagatctccgcgacccgctctttcgacggtggccgcgaggtcattggagatacggcccatgagttgggagaatgcattcatgcccgcctcgttccagacgcggctgtaaaccacggccccctcggagtctcttgcgcgcatcaccacctgagcgaggttaagctccacgtgtctggtgaagaccgcatagttgcataggcgctgaaaaaggtagttgagtgtggtggcaatgtgttcggcgacgaagaaatacatgatccatcgtctcagcggcatttcgctaacatcgcccagagcttccaagcgctccatggcctcgtagaagtccacggcaaaattaaaaaactgggagtttcgcgcggacacggtcaattcctcctcgagaagacggatgagttcggctatggtggcccgtacttcgcgttcgaaggctcccgggatctcttcttcctcttctatctcttcttccactaacatctcttcttcgtcttcaggcgggggcggagggggcacgcggcgacgtcgacggcgcacgggcaaacggtcgatgaatcgttcaatgacctctccgcggcggcggcgcatggtttcagtgacggcgcggccgttctcgcgcggtcgcagagtaaaaacaccgccgcgcatctccttaaagtggtgactgggaggttctccgtttgggagggagagggcgctgattatacattttattaattggcccgtagggactgcacgcagagatctgatcgtgtcaagatccacgggatctgaaaacctttcgacgaaagcgtctaaccagtcacagtcacaaggtaggctgagtacggcttcttgtgggcgggggtggttatgtgttcggtctgggtcttctgtttcttcttcatctcgggaaggtgagacgatgctgctggtgatgaaattaaagtaggcagttctaagacggcggatggtggcgaggagcaccaggtctttgggtccggcttgctggatacgcaggcgattggccattccccaagcattatcctgacatctagcaagatctttgtagtagtcttgcatgagccgttctacgggcacttcttcctcacccgttctgccatgcatacgtgtgagtccaaatccgcgcattggttgtaccagtgccaagtcagctacgactctttcggcgaggatggcttgctgtacttgggtaagggtggcttgaaagtcatcaaaatccacaaagcggtggtaagctcctgtattaatggtgtaagcacagttggccatgactgaccagttaactgtctggtgaccagggcgcacgagctcggtgtatttaaggcgcgaataggcgcgggtgtcaaagatgtaatcgttgcaggtgcgcaccagatactggtaccctataagaaaatgcggcggtggttggcggtagagaggccatcgttctgtagctggagcgccaggggcgaggtcttccaacataaggcggtgatagccgtagatgtacctggacatccaggtgattcctgcggcggtagtagaagcccgaggaaactcgcgtacgcggttccaaatgttgcgtagcggcatgaagtagttcattgtaggcacggtttgaccagtgaggcgcgcgcagtcattgatgctctatagacacggagaaaatgaaagcgttcagcgactcgactccgtagcctggaggaacgtgaacgggttgggtcgcggtgtaccccggttcgagacttgtactcgagccggccggagccgcggctaacgtggtattggcactcccgtctcgacccagcctacaaaaatccaggatacggaatcgagtcgttttgctggtttccgaatggcagggaagtgagtcctattttttttttttttgccgctcagatgcatcccgtgctgcgacagatgcgcccccaacaacagcccccctcgcagcagcagcagcagcaatcacaaaaggctgtccctgcaactactgcaactgccgccgtgagcggtgcgggacagcccgcctatgatctggacttggaagagggcgaaggactggcacgtctaggtgcgccttcacccgagcggcatccgcgagttcaactgaaaaaagattctcgcgaggcgtatgtgccccaacagaacctatttagagacagaagcggcgaggagccggaggagatgcgagcttcccgctttaacgcgggtcgtgagctgcgtcacggtttggaccgaagacgagtgttgcgggacgaggatttcgaagttgatgaaatgacagggatcagtcctgccagggcacacgtggctgcagccaaccttgtatcggcttacgagcagacagtaaaggaagagcgtaacttccaaaagtcttttaataatcatgtgcgaaccctgattgcccgcgaagaagttacccttggtttgatgcatttgtgggatttgatggaagctatcattcagaaccctactagcaaacctctgaccgcccagctgtttctggtggtgcaacacagcagagacaatgaggctttcagagaggcgctgctgaacatcaccgaacccgaggggagatggttgtatgatcttatcaacattctacagagtatcatagtgcaggagcggagcctgggcctggccgagaaggtggctgccatcaattactcggttttgagcttgggaaaatattacgctcgcaaaatctacaagactccatacgttcccatagacaaggaggtgaagatagatgggttctacatgcgcatgacgctcaaggtcttgaccctgagcgatgatcttggggtgtatcgcaatgacagaatgcatcgcgcggttagcgccagcaggaggcgcgagttaagcgacagggaactgatgcacagtttgcaaagagctctgactggagctggaaccgagggtgagaattacttcgacatgggagctgacttgcagtggcagcctagtcgcagggctctgagcgccgcgacggcaggatgtgagcttccttacatagaagaggcggatgaaggcgaggaggaagagggcgagtacttggaagactgatggcacaacccgtgttttttgctagatggaacagcaagcaccggatcccgcaatgcgggcggcgctgcagagccagccgtccggcattaactcctcggacgattggacccaggccatgcaacgtatcatggcgttgacgactcgcaaccccgaagcctttagacagcaaccccaggccaaccgtctatcggccatcatggaagctgtagtgccttcccgctctaatcccactcatgagaaggtcctggccatcgtgaacgcgttggtggagaacaaagctattcgtccagatgaggccggactggtatacaacgctctcttagaacgcgtggctcgctacaacagtagcaatgtgcaaaccaatttggaccgtatgataacagatgtacgcgaagccgtgtctcagcgcgaaaggttccagcgtgatgccaacctgggttcgctggtggcgttaaatgctttcttgagtactcagcctgctaatgtgccgcgtggtcaacaggattatactaactttttaagtgctttgagactgatggtatcagaagtacctcagagcgaagtgtatcagtccggtcctgattacttctttcagactagcagacagggcttgcagacggtaaatctgagccaagcttttaaaaaccttaaaggtttgtggggagtgcatgccccggtaggagaaagagcaaccgtgtctagcttgttaactccgaactcccgcctattattactgttggtagctcctttcaccgacagcggtagcatcgaccgtaattcctatttgggttacctactaaacctgtatcgcgaagccatagggcaaagtcaggtggacgagcagacctatcaagaaattacccaagtcagtcgcgctttgggacaggaagacactggcagtttggaagccactctgaacttcttgcttaccaatcggtctcaaaagatccctcctcaatatgctcttactgcggaggaggagaggatccttagatatgtgcagcagagcgtgggattgtttctgatgcaagagggggcaactccgactgcagcactggacatgacagcgcgaaatatggagcccagcatgtatgccagtaaccgacctttcattaacaaactgctggactacttgcacagagctgccgctatgaactctgattatttcaccaatgccatcttaaacccgcactggctgcccccacctggtttctacacgggcgaatatgacatgcccgaccctaatgacggatttctgtgggacgacgtggacagcgatgttttttcacctctttctgatcatcgcacgtggaaaaaggaaggcggcgatagaatgcattcttctgcatcgctgtccggggtcatgggtgctaccgcggctgagcccgagtctgcaagtccttttcctagtctacccttttctctacacagtgtacgtagcagcgaagtgggtagaataagtcgcccgagtttaatgggcgaagaggagtatctaaacgattccttgctcagaccggcaagagaaaaaaatttcccaaacaatggaatagaaagtttggtggataaaatgagtagatggaagacttatgctcaggatcacagagacgagcctgggatcatggggattacaagtagagcgagccgtagacgccagcgccatgacagacagaggggtcttgtgtgggacgatgaggattcggccgatgatagcagcgtgctggacttgggtgggagaggaaggggcaacccgtttgctcatttgcgccctcgcttgggtggtatgttgtaaaaaaaaataaaaaaaaaactcaccaaggccatggcgacgagcgtacgttcgttcttctttattatctgtgtctagtataatgaggcgagtcgtgctaggcggagcggtggtgtatccggagggtcctcctccttcgtacgagagcgtgatgcagcagcagcaggcgacggcggtgatgcaatccccactggaggctccctttgtgcctccgcgatacctggcacctacggagggcagaaacagcattcgttattcggaactggcacctcagtacgataccaccaggttgtatctggtggacaacaagtcggcggacattgcttctctgaactatcagaatgaccacagcaacttcttgaccacggtggtgcaaaacaatgactttacccctacggaagccagcacccagaccattaactttgatgaacgatcgcggtggggcggtcagctaaagaccatcatgcatactaacatgccaaacgtgaacgagtatatgtttagtaacaagttcaaagcgcgtgtgatggtgtccagaaaacctcccgacggtgctgcagttggggatacttatgatcacaagcaggatattttgaaatatgagtggttcgagtttactttgccagaaggcaacttttcagttactatgactattgatttgatgaacaatgccatcatagataattacttgaaagtgggtagacagaatggagtgcttgaaagtgacattggtgttaagttcgacaccaggaacttcaagctgggatgggatcccgaaaccaagttgatcatgcctggagtgtatacgtatgaagccttccatcctgacattgtcttactgcctggctgcggagtggattttaccgagagtcgtttgagcaaccttcttggtatcagaaaaaaacagccatttcaagagggttttaagattttgtatgaagatttagaaggtggtaatattccggccctcttggatgtagatgcctatgagaacagtaagaaagaacaaaaagccaaaatagaagctgctacagctgctgcagaagctaaggcaaacatagttgccagcgactctacaagggttgctaacgctggagaggtcagaggagacaattttgcgccaacacctgttccgactgcagaatcattattggccgatgtgtctgaaggaacggacgtgaaactcactattcaacctgtagaaaaagatagtaagaatagaagctataatgtgttggaagacaaaatcaacacagcctatcgcagttggtatctttcgtacaattatggcgatcccgaaaaaggagtgcgttcctggacattgctcaccacctcagatgtcacctgcggagcagagcaggtctactggtcgcttccagacatgatgaaggatcctgtcactttccgctccactagacaagtcagtaactaccctgtggtgggtgcagagcttatgcccgtcttctcaaagagcttctacaacgaacaagctgtgtactcccagcagctccgccagtccacctcgcttacgcacgtcttcaaccgctttcctgagaaccagattttaatccgtccgccggcgcccaccattaccaccgtcagtgaaaacgttcctgctctcacagatcacgggaccctgccgttgcgcagcagtatccggggagtccaacgtgtgaccgttactgacgccagacgccgcacctgtccctacgtgtacaaggcactgggcatagtcgcaccgcgcgtcctttcaagccgcactttctaaaaaaaaaaaaaatgtccattcttatctcgcccagtaataacaccggttggggtctgcgcgctccaagcaagatgtacggaggcgcacgcaaacgttctacccaacatcctgtccgtgttcgcggacattttcgcgctccatggggcgccctcaagggccgcactcgcgttcgaaccaccgtcgatgatgtaatcgatcaggtggttgccgacgcccgtaattatactcctactgcgcctacatctactgtggatgcagttattgacagtgtagtggctgacgctcgcaactatgctcgacgtaagagccggcgaaggcgcattgccagacgccaccgagctaccactgccatgcgagccgcaagagctctgctacgaagagctagacgcgtggggcgaagagccatgcttagggcggccagacgtgcagcttcgggcgccagcgccggcaggtcccgcaggcaagcagccgctgtcgcagcggcgactattgccgacatggcccaatcgcgaagaggcaatgtatactgggtgcgtgacgctgccaccggtcaacgtgtacccgtgcgcacccgtccccctcgcacttagaagatactgagcagtctccgatgttgtgtcccagcggcgaggatgtccaagcgcaaatacaaggaagaaatgctgcaggttatcgcacctgaagtctacggccaaccgttgaaggatgaaaaaaaaccccgcaaaatcaagcgggttaaaaaggacaaaaaagaagaggaagatggcgatgatgggctggcggagtttgtgcgcgagtttgccccacggcgacgcgtgcaatggcgtgggcgcaaagttcgacatgtgttgagacctggaacttcggtggtctttacacccggcgagcgttcaagcgctacttttaagcgttcctatgatgaggtgtacggggatgatgatattcttgagcaggcggctgaccgattaggcgagtttgcttatggcaagcgtagtagaataacttccaaggatgagacagtgtcgatacccttggatcatggaaatcccacccctagtcttaaaccggtcactttgcagcaagtgttacccgtaactccgcgaacaggtgttaaacgcgaaggtgaagatttgtatcccactatgcaactgatggtacccaaacgccagaagttggaggacgttttggagaaagtaaaagtggatccagatattcaacctgaggttaaagtgagacccattaagcaggtagcgcctggtctgggggtacaaactgtagacattaagattcccactgaaagtatggaagtgcaaactgaacccgcaaagcctactgccacctccactgaagtgcaaacggatccatggatgcccatgcctattacaactgacgccgccggtcccactcgaagatcccgacgaaagtacggtccagcaagtctgttgatgcccaattatgttgtacacccatctattattcctactcctggttaccgaggcactcgctactatcgcagccgaaacagtacctcccgccgtcgccgcaagacacctgcaaatcgcagtcgtcgccgtagacgcacaagcaaaccgactcccggcgccctggtgcggcaagtgtaccgcaatggtagtgcggaacctttgacactgccgcgtgcgcgttaccatccgagtatcatcacttaatcaatgttgccgctgcctccttgcagatatggccctcacttgtcgccttcgcgttcccatcactggttaccgaggaagaaactcgcgccgtagaagagggatgttgggacgcggaatgcgacgctacaggcgacggcgtgctatccgcaagcaattgcggggtggttttttaccagccttaattccaattatcgctgctgcaattggcgcgataccaggcatagcttccgtggcggttcaggcctcgcaacgacattgacattggaaaaaaacgtataaataaaaaaaaaaaaatacaatggactctgacactcctggtcctgtgactatgttttcttagagatggaagacatcaatttttcatccttggctccgcgacacggcacgaagccgtacatgggcacctggagcgacatcggcacgagccaactgaacgggggcgccttcaattggagcagtatctggagcgggcttaaaaattttggctcaaccataaaaacatacgggaacaaagcttggaacagcagtacaggacaggcgcttagaaataaacttaaagaccagaacttccaacaaaaagtagtcgatgggatagcttccggcatcaatggagtggtagatttggctaaccaggctgtgcagaaaaagataaacagtcgtttggacccgccgccagcaaccccaggtgaaatgcaagtggaggaagaaattcctccgccagaaaaacgaggcgacaagcgtccgcgtcccgatttggaagagacgctggtgacgcgcgtagatgaaccgccttcttatgaggaagcaacgaagcttggaatgcccaccactagaccgatagccccaatggccaccggggtgatgaaaccttctcagttgcatcgacccgtcaccttggatttgccccctccccctgctgctactgctgtacccgcttctaagcctgtcgctgccccgaaaccagtcgccgtagccaggtcacgtcccgggggcgctcctcgtccaaatgcgcactggcaaaatactctgaacagcatcgtgggtctaggcgtgcaaagtgtaaaacgccgtcgctgcttttaattaaatatggagtagcgcttaacttgcctatctgtgtatatgtgtcattacacgccgtcacagcagcagaggaaaaaaggaagaggtcgtgcgtcgacgctgagttactttcaagatggccaccccatcgatgctgccccaatgggcatacatgcacatcgccggacaggatgcttcggagtacctgagtccgggtctggtgcagttcgcccgcgccacagacacctacttcaatctgggaaataagtttagaaatcccaccgtagcgccgacccacgatgtgaccaccgaccgtagccagcggctcatgttgcgcttcgtgcccgttgaccgggaggacaatacatactcttacaaagtgcggtacaccctggccgtgggcgacaacagagtgctggatatggccagcacgttctttgacattaggggtgtgttggacagaggtcccagtttcaaaccctattctggtacggcttacaactccctggctcctaaaggcgctccaaatacatctcagtggattgcagaaggtgtaaaaaatacaactggtgaggaacacgtaacagaagaggaaaccaatactactacttacacttttggcaatgctcctgtaaaagctgaagctgaaattacaaaagaaggactcccagtaggtttggaagtttcagatgaagaaagtaaaccgatttatgctgataaaacatatcagccagaacctcagctgggagatgaaacttggactgaccttgatggaaaaaccgaaaagtatggaggcagggctctcaaacccgatactaagatgaaaccatgctacgggtcctttgccaaacctactaatgtgaaaggcggtcaggcaaaacaaaaaacaacggagcagccaaatcagaaagtcgaatatgatatcgacatggagttttttgatgcggcatcgcagaaaacaaacttaagtcctaaaattgtcatgtatgcagaaaatgtaaatttggaaactccagacactcatgtagtgtacaaacctggaacagaagacacaagttccgaagctaatttgggacaacaatctatgcccaacagacccaactacattggcttcagagataactttattggacttatgtactataacagtactggtaacatgggggtgctggctggtcaagcgtctcagttaaatgcagtggttgacttgcaggacagaaacacagaactttcttaccaactcttgcttgactctctgggcgacagaaccagatactttagcatgtggaatcaggctgtggacagttatgatcctgatgtacgtgttattgaaaatcatggtgtggaagatgaacttcccaactactgttttccactggacggcataggtgttccaacaaccagttacaaatcaatagttccaaatggagacaatgcgcctaattggaaggaacctgaagtaaatggaacaagtgagatcggacagggtaatttgtttgccatggaaattaaccttcaagccaatctatggcgaagtttcctttattccaatgtggctctatatctcccagactcgtacaaatacaccccgtccaatgtcactcttccagaaaacaaaaacacctacgactacatgaacgggcgggtggtgccgccatctctagtagacacctatgtgaacattggtgccaggtggtctctggatgccatggacaatgtcaacccattcaaccaccaccgtaacgctggcttgcgttaccgatccatgcttctgggtaacggacgttatgtgcctttccacatacaagtgcctcaaaaattcttcgctgttaaaaacctgctgcttctcccaggctcctacacttatgagtggaactttaggaaggatgtgaacatggttctacagagttccctcggtaacgacctgcgggtagatggcgccagcatcagtttcacgagcatcaacctctatgctacttttttccccatggctcacaacaccgcttccacccttgaagccatgctgcggaatgacaccaatgatcagtcattcaacgactacctatctgcagctaacatgctctaccccattcctgccaatgcaaccaatattcccatttccattccttctcgcaactgggcggctttcagaggctggtcatttaccagactgaaaaccaaagaaactccctctttggggtctggatttgacccctactttgtctattctggttctattccctacctggatggtaccttctacctgaaccacacttttaagaaggtttccatcatgtttgactcttcagtgagctggcctggaaatgacaggttactatctcctaacgaatttgaaataaagcgcactgtggatggcgaaggctacaacgtagcccaatgcaacatgaccaaagactggttcttggtacagatgctcgccaactacaacatcggctatcagggcttctacattccagaaggatacaaagatcgcatgtattcatttttcagaaacttccagcccatgagcaggcaggtggttgatgaggtcaattacaaagacttcaaggccgtcgccataccctaccaacacaacaactctggctttgtgggttacatggctccgaccatgcgccaaggtcaaccctatcccgctaactatccctatccactcattggaacaactgccgtaaatagtgttacgcagaaaaagttcttgtgtgacagaaccatgtggcgcataccgttctcgagcaacttcatgtctatgggggcccttacagacttgggacagaatatgctctatgccaactcagctcatgctctggacatgacctttgaggtggatcccatggatgagcccaccctgctttatcttctcttcgaagttttcgacgtggtcagagtgcatcagccacaccgcggcatcatcgaggcagtctacctgcgtacaccgttctcggccggtaacgctaccacgtaagaagcttcttgcttcttgcaaatagcagctgcaaccatggcctgcggatcccaaaacggctccagcgagcaagagctcagagccattgtccaagacctgggttgcggaccctattttttgggaacctacgataagcgcttcccggggttcatggcccccgataagctcgcctgtgccattgtaaatacggccggacgtgagacggggggagagcactggttggctttcggttggaacccacgttctaacacctgctacctttttgatccttttggattctcggatgatcgtctcaaacagatttaccagtttgaatatgagggtctcctgcgccgcagcgctcttgctaccaaggaccgctgtattacgctggaaaaatctacccagaccgtgcagggtccccgttctgccgcctgcggacttttctgctgcatgttccttcacgcctttgtgcactggcctgaccgtcccatggacggaaaccccaccatgaaattgctaactggagtgccaaacaacatgcttcattctcctaaagtccagcccaccctgtgtgacaatcaaaaagcactctaccattttcttaatacccattcgccttattttcgctcccatcgtacacacatcgaaagggccactgcgttcgaccgtatggatgttcaataatgactcatgtaaacaacgtgttcaataaacatcactttatttttttacatgtatcaaggctctgcattacttatttatttacaagtcgaatgggttctgacgagaatcagaatgacccgcaggcagtgatacgttgcggaactgatacttgggttgccacttgaattcgggaatcaccaacttgggaaccggtatatcgggcaggatgtcactccacagctttctggtcagctgcaaagctccaagcaggtcaggagccgaaatcttgaaatcacaattaggaccagtgctttgagcgcgagagttgcggtacaccggattgcagcactgaaacaccatcagcgacggatgtctcacgcttgccagcacggtgggatctgcaatcatgcccacatccagatcttcagcattggcaatgctgaacggggtcatcttgcaggtctgcctacccatggcgggcacccaattaggcttgtggttgcaatcgcagtgcagggggatcagtatcatcttggcctgatcctgtctgattcctggatacacggctctcatgaaagcatcatattgcttgaaagcctgctgggctttactaccctcggtataaaacatcccgcaggacctgctcgaaaactggttagctgcacagccggcatcattcacacagcagcgggcgtcattgttagctatttgcaccacacttctgccccagcggttttgggtgattttggttcgctcgggattctcctttaaggctcgttgtccgttctcgctggccacatccatctcgataatctgctccttctgaatcataatattgccatgcaggcacttcagcttgccctcataatcattgcagccatgaggccacaacgcacagcctgtacattcccaattatggtgggcgatctgagaaaaagaatgtatcattccctgcagaaatcttcccatcatcgtgctcagtgtcttgtgactagtgaaagttaactggatgcctcggtgctcctcgtttacgtactggtgacagatgcgcttgtattgttcgtgttgctcaggcattagtttaaaagaggttctaagttcgttatccagcctgtacttctccatcagcagacacatcacttccatgcctttctcccaagcagacaccaggggcaagctaatcggattcttaacagtgcaggcagcagctcctttagccagagggtcatctttagcgatcttctcaatgcttcttttgccatccttctcaacgatgcgcacgggcgggtagctgaaacccactgctacaagttgcgcctcttctctttcttcttcgctgtcttgactgatgtcttgcatggggatatgtttggtcttccttggcttctttttggggggtatcggaggaggaggactgtcgctccgttccggagacagggaggattgtgacgtttcgctcaccattaccaactgactgtcggtagaagaacctgaccccacacggcgacaggtgtttctcttcgggggcagaggtggaggcgattgcgaagggctgcggtccgacctggaaggcggatgactggcagaaccccttccgcgttcgggggtgtgctccctgtggcggtcgcttaactgatttccttcgcggctggccattgtgttctcctaggcagagaaacaacagacatggaaactcagccattgctgtcaacatcgccacgagtgccatcacatctcgtcctcagcgacgaggaaaaggagcagagcttaagcattccaccgcccagtcctgccaccacctctaccctagaagataaggaggtcgacgcatctcatgacatgcagaataaaaaagcgaaagagtctgagacagacatcgagcaagacccgggctatgtgacaccggtggaacacgaggaagagttgaaacgctttctagagagagaggatgaaaactgcccaaaacaacgagcagataactatcaccaagatgctggaaatagggatcagaacaccgactacctcatagggcttgacggggaagacgcgctccttaaacatctagcaagacagtcgctcatagtcaaggatgcattattggacagaactgaagtgcccatcagtgtggaagagctcagccgcgcctacgagcttaacctcttttcacctcgtactccccccaaacgtcagccaaacggcacctgcgagccaaatcctcgcttaaacttttatccagcttttgctgtgccagaagtactggctacctatcacatcttttttaaaaatcaaaaaattccagtctcctgccgcgctaatcgcacccgcgccgatgccctactcaatctgggacctggttcacgcttacctgatatagcttccttggaagaggttccaaagatcttcgagggtctgggcaataatgagactcgggccgcaaatgctctgcaaaagggagaaaatggcatggatgagcatcacagcgttctggtggaattggaaggcgataatgccagactcgcagtactcaagcgaagcatcgaggtcacacacttcgcatatcccgctgtcaacctgccccctaaagtcatgacggcggtcatggaccagttactcattaagcgcgcaagtcccctttcagaagacatgcatgacccagatgcctgtgatgagggtaaaccagtggtcagtgatgagcagctaacccgatggctgggcaccgactctcccagggatttggaagagcgtcgcaagcttatgatggccgtggtgctggttaccgtagaactagagtgtctccgacgtttctttaccgattcagaaaccttgcgcaaactcgaagagaatctgcactacacttttagacacggctttgtgcggcaggcatgcaagatatctaacgtggaactcaccaacctggtttcctacatgggtattctgcatgagaatcgcctaggacaaagcgtgctgcacagcaccctgaagggggaagcccgccgtgattacatccgcgattgtgtctatctgtacctgtgccacacgtggcaaaccggcatgggtgtatggcagcaatgtttagaagaacagaacttgaaagagcttgacaagctcttacagaaatctcttaaggttctgtggacagggttcgacgagcgcaccgtcgcttccgacctggcagacctcatcttcccagagcgtctcagggttactttgcgaaacggattgcctgactttatgagccagagcatgcttaacaattttcgctctttcatcctggaacgctccggtatcctgcccgccacctgctgcgcactgccctccgactttgtgcctctcacctaccgcgagtgccccccgccgctatggagtcactgctacctgttccgtctggccaactatctctcctaccactcggatgtgatcgaggatgtgagcggagacggcttgctggagtgtcactgccgctgcaatctgtgcacgccccaccggtccctagcttgcaacccccagttgatgagcgaaacccagataataggcacctttgaattgcaaggccccagcagccaaggcgatgggtcttctcctgggcaaagtttaaaactgaccccgggactgtggacctccgcctacttgcgcaagtttgctccggaagattaccacccctatgaaatcaagttctatgaggaccaatcacagcctccaaaggccgaactttcggcctgcgtcatcacccagggggcaattctggcccaattgcaagccatccaaaaatcccgccaagaatttctactgaaaaagggtaagggggtctaccttgacccccagaccggcgaggaactcaacacaaggttccctcaggatgtcccaacgacgagaaaacaagaagttgaaggtgcagccgccgcccccagaagatatggaggaagattgggacagtcaggcagaggaggcggaggaggacagtctggaggacagtctggaggaagacagtttggaggaggaaaacgaggaggcagaggaggtggaagaagtaaccgccgacaaacagttatcctcggctgcggagacaagcaacagcgctaccatctccgctccgagtcgaggaacccggcggcgtcccagcagtagatgggacgagaccggacgcttcccgaacccaaccagcgcttccaagaccggtaagaaggatcggcagggatacaagtcctggcgggggcataagaatgccatcatctcctgcttgcatgagtgcgggggcaacatatccttcacgcggcgctacttgctattccaccatggggtgaactttccgcgcaatgttttgcattactaccgtcacctccacagcccctactatagccagcaaatcccggcagtctcgacagataaagacagcggcggcgacctccaacagaaaaccagcagcggcagttagaaaatacacaacaagtgcagcaacaggaggattaaagattacagccaacgagccagcgcaaacccgagagttaagaaatcggatctttccaaccctgtatgccatcttccagcagagtcggggtcaagagcaggaactgaaaataaaaaaccgatctctgcgttcgctcaccagaagttgtttgtatcacaagagcgaagatcaacttcagcgcactctcgaggacgccgaggctctcttcaacaagtactgcgcgctgactcttaaagagtaggcagcgaccgcgcttattcaaaaaaggcgggaattacatcatcctcgacatgagtaaagaaattcccacgccttacatgtggagttatcaaccccaaatgggattggcggcaggcgcctcccaggactactccacccgcatgaattggctcagcgccgggccttctatgatttctcgagttaatgatatacgcgcctaccgaaaccaaatacttttggaacagtcagctcttaccaccacgccccgccaacaccttaatcccagaaattggcccgccgccctagtgtaccaggaaagtcccgctcccaccactgtattacttcctcgagacgcccaggccgaagtccaaatgactaatgcaggtgcgcagttagctggcggctccaccctatgtcgtcacaggcctcggcataatataaaacgcctgatgatcagaggccgaggtatccagctcaacgacgagtcggtgagctctccgcttggtctacgaccagacggaatctttcagattgccggctgcgggagatcttccttcacccctcgtcaggctgttctgactttggaaagttcgtcttcgcaaccccgctcgggcggaatcgggaccgttcaatttgtggaggagtttactccctctgtctacttcaaccccttctccggatctcctgggcattacccggacgagttcataccgaacttcgacgcgattagcgagtcagtggacggctacgattgatgtctggtgacgcggctgagctatctcggctgcgacatctagaccactgccgccgctttcgctgctttgcccgggaactcattgagttcatctacttcgaactccccaaggatcaccctcaaggtccggcccacggagtgcggatttctatcgaaggcaaaatagactctcgcctgcaacgaattttctcccagcggcccgtgctgatcgagcgagaccagggaaacaccacggtttccatctactgcatttgtaatcaccccggattgcatgaaagcctttgctgtcttatgtgtactgagtttaataaaaactgaattaagactctcctacggactgccgcttcttcaacccggattttacaaccagaagaacgaaacttttcctgtcgtccaggactctgttaacttcacctttcctactcacaaactagaagctcaacgactacaccgcttttccagaagcattttccctactaatactactttcaaaaccggaggtgagctccaaggtcttcctacagaaaacccttgggtggaagcgggccttgtagtgctaggaattcttgcgggtgggcttgtgattattctttgctacctatacacaccttgcttcactttcttagtggtgttgtggtattggtttaaaaaatggggcccatactagtcttgcttgttttactttcgcttttggaaccgggttctgccaattacgatccatgtctagacttcgacccagaaaactgcacacttacttttgcacccgacacaagccgcatctgtggagttcttattaagtgcggatgggaatgcaggtccgttgaaattacacacaataacaaaacctggaacaataccttatccaccacatgggagccaggagttcccgagtggtacactgtctctgtccgaggtcctgacggttccatccgcattagtaacaacactttcattttttctgaaatgtgcgatctggccatgttcatgagcaaacagtattctctatggcctcctagcaaggacaacatcgtaacgttctccattgcttattgcttgtgcgcttgccttcttactgctttactgtgcgtatgcatacacctgcttgtaaccactcgcatcaaaaacgccaataacaaagaaaaaatgccttaacctctttctgtttacagacatggcttctcttacatctctcatatttgtcagcattgtcactgccgctcatggacaaacagtcgtctctatccctctaggacataattacactctcataggacccccaatcacttcagaggtcatctggaccaaactgggaagcgttgattactttgatataatctgcaacaaaacaaaaccaataatagtaacttgcaacatacaaaatcttacattgattaatgttagcaaagtttacagcggttactattatggttatgacagatacagtagtcaatatagaaattacttggttcgtgttacccagttgaaaaccacgaaaatgccaaatatggcaaagattcgatccgatgacaattctctagaaacttttacatctcccaccacacccgacgaaaaaaacatcccagattcaatgattgcaattgttgcagcggtggcagtggtgatggcactaataataatatgcatgcttttatatgcttgtcgctacaaaaagtttcatcctaaaaaacaagatctcctactaaggcttaacatttaatttctttttatacagccatggtttccactaccacattccttatgcttactagtctcgcaactctgacttctgctcgctcacacctcactgtaactataggctcaaactgcacactaaaaggacctcaaggtggtcatgtcttttggtggagaatatatgacaatggatggtttacaaaaccatgtgaccaacctggtagatttttctgcaacggcagagacctaaccattatcaacgtgacagcaaatgacaaaggcttctattatggaaccgactataaaagtagtttagattataacattattgtactgccatctaccactccagcaccccgcacaactactttctctagcagcagtgtcgctaacaatacaatttccaatccaacctttgccgcgcttttaaaacgcactgtgaataattctacaacttcacatacaacaatttccacttcaacaatcagcattatcgctgcagtgacaattggaatatctattcttgtttttaccataacctactacgcctgctgctatagaaaagacaaacataaaggtgatccattacttagatttgatatttaatttgttctttttttttttatttacagtatggtgaacaccaatcatggtacctagaaatttcttcttcaccatactcatttgtgcatttaatgtttgcgctactttcacagcagtagccacagcaaccccagactgtataggagcatttgcttcctatgcactttttgcttttgttacttgcatctgcgtatgtagcatagtctgcctggttattaattttttccaacttatagactggatccttgtgcgaattgcctacctgcgccaccatcccgaataccgcaaccaaaatatcgcggcacttcttagactcatctaaaaccatgcaggctatactaccaatatttttgcttctattgcttccctacgctgtctcaaccccagctgcctatagtactccaccagaacaccttagaaaatgcaaattccaacaaccgtggtcatttcttgcttgctatcgagaaaaatcagaaattcccccaaatttaataatgattgctggaataattaatataatctgttgcaccataatttcatttttgatataccccctatttgattttggctggaatgctcccaatgcacatgatcatccacaagacccagaggaacacattcccctacaaaacatgcaacatccaatagcgctaatagattacgaaagtgaaccacaacccccactactccctgctattagttacttcaacctaaccggcggagatgactgaaacactcaccacctccaattccgccgaggatctgctcgatatggacggccgcgtctcagaacagcgactcgcccaactacgcatccgccagcagcaggaacgcgcggccaaagagctcagagatgtcatccaaattcaccaatgcaaaaaaggcatattctgtttggtaaaacaagccaagatatcctacgagatcaccgctactgaccatcgcctctcttacgaacttggcccccaacgacaaaaatttacctgcatggtgggaatcaaccccatagttatcacccagcaaagtggagatactaagggttgcattcactgctcctgcgattccatcgagtgcacctacaccctgctgaagaccctatgcggcctaagagacctgctaccaatgaattaaaaaatgattaataaaaaatcacttacttgaaatcagcaataaggtctctgttgaaattttctcccagcagcacctcacttccctcttcccaactctggtattctaaaccccgttcagcggcatactttctccatactttaaaggggatgtcaaattttagctcctctcctgtacccacaatcttcatgtctttcttcccagatgaccaagagagtccggctcagtgactccttcaaccctgtctacccctatgaagatgaaagcacctcccaacacccctttataaacccagggtttatttccccaaatggcttcacacaaagcccaaacggagttcttactttaaaatgtttaaccccactaacaaccacaggcggatctctacagctaaaagtgggagggggacttacagtggatgacaccaacggttttttgaaagaaaacataagtgccaccacaccactcgttaagactggtcactctataggtttaccactaggagccggattgggaacgaatgaaaataaactttgtatcaaattaggacaaggacttacattcaattcaaacaacatttgcattgatgacaatattaacaccttatggacaggagtcaaccccaccgaagccaactgtcaaatcatgaactccagtgaatctaatgattgcaaattaattctaacactagttaaaactggagcactagtcactgcatttgtttatgttataggagtatctaacaattttaatatgctaactacacacagaaatataaattttactgcagagctgtttttcgattctactggtaatttactaactagactctcatccctcaaaactccacttaatcataaatcaggacaaaacatggctactggtgccattactaatgctaaaggtttcatgcccagcacgactgcctatcctttcaatgataattctagagaaaaagaaaactacatttacggaacttgttactacacagctagtgatcgcactgcttttcccattgacatatctgtcatgcttaaccgaagagcaataaatgacgagacatcatattgtattcgtataacttggtcctggaacacaggagatgccccagaggtgcaaacctctgctacaaccctagtcacctccccatttaccttttactacatcagagaagacgactgacaaataaagtttaacttgtttatttgaaaatcaattcacaaaatccgagtagttattttgcctcccccttcccatttaacagaatacaccaatctctccccacgcacagctttaaacatttggataccattagatatagacatggttttagattccacattccaaacagtttcagagcgagccaatctggggtcagtgatagataaaaatccatcgggatagtcttttaaagcgctttcacagtccaactgctgcggatgcgactccggagtctggatcacggtcatctggaagaagaacgatgggaatcataatccgaaaacggtatcggacgattgtgtctcatcaaacccacaagcagccgctgtctgcgtcgctccgtgcgactgctgtttatgggatcagggtccacagtgtcctgaagcatgattttaatagcccttaacatcaactttctggtgcgatgcgcgcagcaacgcattctgatttcactcaaatctttgcagtaggtacaacacattattacaatattgtttaataaaccataattaaaagcgctccagccaaaactcatatctgatataatcgcccctgcatgaccatcataccaaagtttaatataaattaaatgacgttccctcaaaaacacactacccacatacatgatctcttttggcatgtgcatattaacaatctgtctgtaccatggacaacgttggttaatcatgcaacccaatataaccttccggaaccacactgccaacaccgctcccccagccatgcattgaagtgaaccctgctgattacaatgacaatgaagaacccaattctctcgaccgtgaatcacttgagaatgaaaaatatctatagtggcacaacatagacataaatgcatgcatcttctcataatttttaactcctcaggatttagaaacatatcccagggaataggaagctcttgcagaacagtaaagctggcagaacaaggaagaccacgaacacaacttacactatgcatagtcatagtatcacaatctggcaacagcgggtggtcttcagtcatagaagctcgggtttcattttcctcacaacgtggtaactgggctctggtgtaagggtgatgtctggcgcatgatgtcgagcgtgcgcgcaaccttgtcataatggagttgcttcctgacattctcgtattttgtatagcaaaacgcggccctggcagaacacactcttcttcgccttctatcctgccgcttagcgtgttccgtgtgatagttcaagtacaaccacactcttaagttggtcaaaagaatgctggcttcagttgtaatcaaaactccatcgcatctaatcgttctgaggaaatcatccacggtagcatatgcaaatcccaaccaagcaatgcaactggattgtgtttcaagcaggagaggagagggaagagacggaagaaccatgttaatttttattccaaacgatctcgcagtacttcaaattgtagatcgcgcagatggcatctctcgcccccactgtgttggtgaaaaagcacagctagatcaaaagaaatgcgattttcaaggtgctcaacggtggcttccagcaaagcctccacgcgcacatccaagaacaaaagaataccaaaagaaggagcattttctaactcctcaatcatcatattacattcctgcaccattcccagataattttcagctttccagccttgaattattcgtgtcagttcttgtggtaaatccaatccacacattacaaacaggtcccggagggcgccctccaccaccattcttaaacacaccctcataatgacaaaatatcttgctcctgtgtcacctgtagcgaattgagaatggcaacatcaattgacatgcccttggctctaagttcttctttaagttctagttgtaaaaactctctcatattatcaccaaactgcttagccagaagccccccgggaacaagagcaggggacgctacagtgcagtacaagcgcagacctccccaattggctccagcaaaaacaagattggaataagcatattgggaaccgccagtaatatcatcgaagttgctggaaatataatcaggcagagtttcttgtaaaaattgaataaaagaaaaatttgccaaaaaaacattcaaaacctctgggatgcaaatgcaataggttaccgcgctgcgctccaacattgttagttttgaattagtctgcaaaaataaaaaaaaaaacaagcgtcatatcatagtagcctgacgaacagatggataaatcagtctttccatcacaagacaagccacagggtctccagctcgaccctcgtaaaacctgtcatcatgattaaacaacagcaccgaaagttcctcgcggtgaccagcatgaataattcttgatgaagcatacaatccagacatgttagcatcagttaacgagaaaaaacagccaacatagcctttgggtataattatgcttaatcgtaagtatagcaaagccacccctcgcggatacaaagtaaaaggcacaggagaataaaaaatataattatttctctgctgctgttcaggcaacgtcgcccccggtccctctaaatacacatacaaagcctcatcagccatggcttaccagacaaagtacagcgggcacacaaagcacaagctctaaagtgactctccaacctctccacaatatatatatacacaagccctaaactgacgtaatgggagtaaagtgtaaaaaatcccgccaaacccaacacacaccccgaaactgcgtcaccagggaaaagtacagtttcacttccgcaatcccaacaggcgtaacttcctctttctcacggtacgtgatatcccactaacttgcaacgtcattttcccacggtcgcaccgccccttttagccgttaaccccacagccaatcaccacacgatccacactttttaaaatcacctcatttacatattggcaccattccatctataaggtatattattgatgcatggcttaccagacaaagtacagcgggcacacaaagcacaagctctaaagtgactctccaacctctccacaatatatatatacacaagccctaaactgacgtaatgggagtaaagtgtaaaaaatcccgccaaacccaacacacaccccgaaactgcgtcaccagggaaaagtacagtttcacttccgcaatcccaacaggcgtaacttcctctttctcacggtacgtgatatcccactaacttgcaacgtcattttcccacggtcgcaccgccccttttagccgttaaccccacagccaatcaccacacgatccacactttttaaaatcacctcatttacatattggcaccattccatctataaggtatattattgatgatgggccagtgaattgtaatacgactcactatagggcgaattgggccctctagatgcatgctcgagcggccgccagtgtgatggatatctgcagaattcgcccttccttaattaacctgcag

SEQ ID NO: 10 - DNA, 32704 bp, Adenovirus B14a
  MISC_FEATURE (1)..(32704): Complete Genome
ctgcaggttaattaaggaagggcgaattctgcagatatccatcacactggcggccgctcgagcatgcatctagagggcccaattcgccctatagtgagtcgtattacaattcactggcccatcatcaataatataccttatagatggaatggtgccaatatgtaaatgaggtgattttaaaaagtgtgggctgtgtggtaattggctgtggggttaacggctaaaaggggcggcgcggccgtgggaaaatgacgttttttgggggtggagtgtttttgcaagttgtcgcggtaaatgtgacgcaaacaaaggctttttttttacggaactacttagtgttcccacggtatttaacaggaaatgaggtagttttggccggatgcaagtaaaaattgttcattttcgcgcgaaaactgaatgaggaagtggttttctgaataatgcggtatttatggcagggtggagtatttgttcagggccaggtagactttgacccattacgtggaggtttcgattaccgcggaggtttcgattaccgtgttttttacctaaatttccgcgtaccgtgtgaaagtcttctgtttttacgtaggtgtcagctgatcgctacggtatttatacctcagggtttgtgtcaagaggccactcttgagtgccagcgagaagagttttctcctctgcgccggcagtttaatattaaaaaaaatgagacacttgcgatttatgcctcaggaaataatttctgctgagactggaaacgaaatactggagtttgtggtgcacgccctgatgggagacgatccggagccacctgtgcagctttttgagcctcctacgcttcaggaactgtatgatttagaggtagagggatcggaggattctaatgaggaagctgtgaatggcttttttaccgattctatgcttttagctgctaatgaaggattagaattagatccgcctttggacactttcgatactccaggggtgattgtggaaagcggtacaggtgtaagaaaattacctgatttgggttccgtggactgtgatttgcactgctatgaagacgggtttcctttgagtgatgaggaggaccatgaaaaggagcagtctatgcagactgcagcgggtgagggagtgaaggctgccattggttttcagttggattgcccggagcttcctggacatggctgtaagtcttgtgaatttcacaggaaaaatactggagtaaaggaactgttatgttcgctttgttatatgagagcgcactgccactttatttacagtaagtgtgtttaagttaaaatttaaaggaatatgctgtttttcacatgtatattgagtgggaaatttgtgcttcttattataggtcctgtgtctgatgctgatgagtcaccatctcctgattctactacctcacctcctgagattcaagcacctgttcctgtggacgtgcacaagcccattcctgtaaagcttaagcctggaaaacgtccagcagtggaaaaactcgaggacttgttacagggtggggacggacctttggacttgagtacacggaaacggccaagacaataagtgttccatatccgtgtttacttaaggtgacgtcaatatttgtgtgagagtgcaatgtaataaaaatatgttaactgtttactggtttttattgctttttgggcggggactcaggtatataagtagaagcagacctgtgtggttagctcatagaagctggctttgattcatggaggtttgggccattttggaagaccttagaaagactaggcaactgttagagaacgcttcggacggagtctccggtttttggagattctggttcgctagtgaattagctagggtagtttttaggataaaacaggactataaagaagaatttgaaaagttgttggtagattgtccaggactttttgaagctcttaatttgggccatcaagttcactttaaagaaaaagttttatcagttttagacttttcgaccccaggtagaactgccgctgctgtggcttttcttacttttatattagataaatggatcccgcagactcatttcagcaggggatacgttttggatttcgtagccacagcattgtggagaacatggaaggttcgcaagatgaggacaatcttaggttactggccagtgcagcctttgggtgtagcgggaatcctgaggcatccaccggtcatgccagcggttctggaggaggaacagcaagaggacaacccgagagccggcctggaccctccagtggaggaggcggagtagctgacttgtctcctgaactgcaacgggtgcttactggatctacgtccactggacgggataggggcgttaaaagggagagggcatctagtggtactgatgctagatctgagttggctttaagtttaatgagtcgcagacgtcctgaaaccatttggtggcatgaggtccagaaagagggaagggatgaagtttctgtattgcaggagaaatattcactggaacaggtgaaaacatgttggttggagcctgaggatgattgggaggtggccattaaaaattatgccaagatagctttgaggcctgataaacagtataagattactagacggattaatatccggaatgcttgttacatatctggaaatggggctgaggtggtaatagatactccagacaagacagttattagatgctgcatgatggatatgtggcctggagtagtcggtatggaagcagtaacttttgtaaatgttaagtttaggggagatggttataatggaatagtgtttatggccaataccaaacttatattgcatggttgtagcttttttggttttaacaatacctgtgtagatgcctggggacaggttagtgtacggggatgtagtttctatgcgtgttggattgccacagctggcagaaccaagagtcaattgtctctgaagaaatgcatattccaaagatgtaacctgggcattcttaatgaaggcgaagcaagggtccgccactgcgcttctacagatactggatgttttattttaattaagggcaatgccagcgtaaagcataacatgatttgcggtgcttccgatgagaggccttatcaaatgctcacttgtgccggagggcattgtaacatgctggctactgtgcatattgtttctcatcaacgcaaaaaatggcctgtttttgatcacaatgtgttgaccaagtgtaccatgcatgcaggtgggcgtagaggaatgtttatgccttaccagtgtaacatgaatcatgtaaaagtgttgttggaaccagatgccttttccagaatgagtctaacaggaatgtttgacatgaacatgcaaatctggaagatcctgaggtatgatgatacaagatcgagggtgcgcgcatgcgaatgcggaggcaagcatgccaggttccagccggtgtgtgtagatgtgactgaagatctgagaccggatcatttggttattgcccgcactggagcagagttcggatccagtggagaagaaactgactaaggtgagtattgggaaaactttggggtgggattttcagatggacagattgagtaaaaatttgtttttctgtcttgcagctgtcatgagtggaaacgcttcttttaatgggggagtcttcagcccttatctgacagggcgtctcccatcctgggcaggagttcgtcagaatgttatgggatctactgtggatggaagacccgtccaacccgccaattcttcaacgctgacctatgctactttaagttcttcacctttggacgcagctgcagccgccgctgccgcctctgttgccgctaacactgtgcttggaatgggttactatggaagcatcctggctaattccacttcctctaataacccttctaccctgactcaggacaagttacttgtccttttggcccagctggaggctttgacccaacgtctgggtgaactttctcagcaggtggccgagttgcgagtacaaactgagtctgctgtcggcacggcaaagtctaaataaaaaaaaaaaattccagaatcaatgaataaataaacgagcttgttgttgatttaaaatcaagtgttttttatttcatttttcgcgcacggtatgccctagaccaccgatctcgatcattgagaacacggtggattttttccaaaatcctataaaggtgggattgaatgtttagatacatgggcattaggccgtctttggggtggagatagctccattgaagggattcatgctccggggtagtgttgtaaattacccagtcataacaaggtcgctgtgcatggtgttgcacaatatcttttagaagtaggctgattgccacagataagcccttggtgtaggtgtttacaaaccggttgagctgggaggggtgcattcggggtgaaattatgtgcattttggattggatttttaagttggcaatattgccgccaagatctcgtcttgggttcatgttatgaagtaccaccaagacggtgtatccggtacatttaggaaatttatcgtgcagcttggatggaaaagcgtggaaaaatttggagacacccttgtgtcctccgagattttccatgcactcatccatgataatagcaatagggccgtgggcagcagcgcgggcaaacacgttccgtgggtctgacacatcatagttatgttcctgagttaaatcatcataggccattttaataaatttgggacggagagtacccgattggggtatgaatgttccttcgggccccggagcatagttcccctcacagatttgcatttcccaagctttcagttccgagggtggaatcatgtccacctggggggctataaagaacaccgtttctggggctggggtaattagttgggatgatagcaagtttctgagcaattgagatttgccacatccggtggggccataaatgattccgattacaggttgcagttggtagtttagggaacggcaactgccgtcttctcgaagcaagggggccacctcgttcatcatttcccttacatgcatattttcccgcaccaaatccattaggaggcgctctcctcctagtgatagaagttcttgtagtgaggaaaagtttttcagcggttttagaccgtcagccatgggcattttggagagagtctgttgcaaaagttctagtctgttccacagttcagtgatgtgttctatggcatctcgatccagcagacctcctcgtttcgcgggtttggacggctcctggagtagggtatgagacgatgggcgtccagcgctgccagggttcggtccttccagggtctcaaagttcgggtcagggttgtttccgtcacagtgaaggggtgtgcgcctgcttgggcgcttgccagggtgcgcttcagactcatcctgctggtcgaaaacttgtgccgcttggcgccctgtatgtcggccaagtagcagtttaccatgagttcgtagttgagcgcctcggctgcgtggcccttggcgcggagcttacctttggaagttttcttgcataccgggcagtataggcatttcagcgcatacagcttgggcgcaaggaaaatggattctggggagtatgcatccgcgccgcaggaggcgcaaacagtttcacattccaccagccaggttaaatccggttcattggggtcaaaaacaagttttccgccatattttttgatgcgtttcttacctttggtctccatgagttcgtgtcctcgttgagtgacaaacaggctgtccgtgtccccgtagactgattttacaggcctcttttccagtggagtgcctcggtcttcttcgtataggaactctgaccactctgatacaaaggcgcgcgtccaggccagcacaaaggaggctatgtgggaggggtagcgatcgttgtcaaccagggggtccaccttttccaaagtatgcaaacacatgtcactctcttcaacatccaggaatgtgattggcttgtaggtgtatttcacgtgacctggggtcccagctgggggggtataaaagggggcggttctctgctcttcctcactgtcttccggatcgctgtccaggaacgtcagctgttggggtaggtattccctctcgaaggcgggcatgacctctgcactcaggttgtcagtttctaagaacgaggaggatttgatattgacagtgccgcttgagatgcctttcatgaggttttcgtccatttggtcagaaaacacaatttttttattgtcaagtttggtggcaaatgatccatacagggcgttggataaaagtttggcaatggatcgcatggtttggttcttttccttgtccgcgcgctctttggcagcgatgttgagttggacatattcgcgtgccaggcacttccattcggggaagatagttgtcaattcatctggcacaattctcacttgccaccctcggttatgcaaggtaattaaatccacactggtggccacctcgcctcgaaggggttcgttggtccagcagagcctacctcctttcctagaacagaaaggtggaagtgggtctagcataagttcatcgggagggtctgcatccatggtaaagattccaggaagtaaatccttatcaaaatagctgatgggagtggggtcatctaaggccatttgccattctcgagctgccagtgcgcgctcatatgggttaaggggactgccccagggcatgggatgggtgagtgcagaggcatacatgccacagatgtcatagacgtagatgggatcctcaaagatgcctatgtaggttggatagcatcgcccccctctgatacttgctcgcacatagtcatatagttcatgtgacggcgctagcagccccggacccaagttggtgcgattgggtttttctgttctgtagacaatctggcgaaagatggcgtgagaattggaagagatggtgggtctttgaaaaatgttgaagtgggcatgaggtagacctacagagtctctgataaagtgggcataagattcttcaagcttggttaccagttgggcggtgacaagtacgtccagggcgcagtagtcaagtgtttcttgaatgatgtcataacctggttggtttttcttttcccacagttcgcggttgagaaggtattcttcgcgatccttccagtactcttctagcggaaacccgtctttgtctgcacggtaagatcctagcatgtagaactgattaactgccttgtaagggcagcagcccttctctacgggtagagagtatgcttgagcagcttttcgtagcgaagcgtgagtaagggcgaaggtgtctctaaccatgactttgagaaattggtatttaaagtccatgtcgtcacaggctccctgttcccagagttggaagtctacccgtttcttgtaggcggggttgggcaaagcgaaagtaacatcgttgaagagaatcttaccggctctgggcataaaattgcgagtgatgcgaaaaggctgtggtacttccgctcgattgttgatcacctgggcagctaggacgatctcgtcgaagccgttgatgttgtgtcctacaatgtataattctatgaaacgcggcgtgcctctgacgtgaggtagcttattgagctcatcaaaggttaggtctgtagggtcagataaggcgtagtgttcaagggcccattcgtgcagatgaggatttgcatgtaggaatgatgaccaaagatccaccgccagtgctgtttgtaactggtcccgatactgacgaaaatgctggccaattgccattttttctggagtgacacagtagaaggttccgggatcttgttgccatcgatcccacttaagtttaatggctagatcgtgggccatgttgacgagacgctcttctcctgagagtttcatgaccagcatgaaaggaactagttgtttgccaaaggaccccatccaggtgtaagtttccacatcgtaggtcaggaagagtctttctgtgcgaggatgagagccgattgggaaaaactggatttcctgccaccagttggaggattggctgttgatgtgatggaagtagaagtttctgcggcgcgccgagcattcgtgtttgtgcttgtacagacggccgcagtagtcgcagcgttgcacgggttgtatctcgtgaatgagctgtacctggcttcccttgacgagaaatttcagtgggaagccgaggcctggcgattgtatctcgtgctcttctatattcgctgtattggcctgttcatcttctgtttcgatggtggtcatgctgacgagcccccgcgggaggcaagtccagacctcggcgcgggaggggcggagctgaaggacgagagcgcgcaggctggagctgtccagagtcctgagacgctgcggactcaggttagtaggtagggacagaagattaacttgcatgatcttttccagggcgtgcgggaggtttagatggtacttgatttccacaggttcgtttgtagagacgtcaatggcttgcagggttccgtgtcctttgggtgccactaccgtacctttgttttttcttttgatcggtggtggctctcttgcttcttgcatgcttaaaagcggtgacggggacgcgcgccgggcggcagcggttgttccggacccgggggcatggctggtagtggcacgtcggcgccgcgcacgggcaggttctggtactgcgctctgagaagacttgcgtgcgccaccacgcgtcgattgacgtcttgtatctgacgtctttgggtgaaagctaccggccccgtgagcttgaacctgaaagagagttcaacagaatcaatttcggtatcgttaacggcagcttgtctcagtatttcttgtacgtcaccagagttgtcctggtaggcgatctccgccatgaactgctcgatttcttcctcctgaagatctccgcgacccgctctctcgacggtggccgcgaggtcattggagatacggcccatgagttgggagaatgcattcatgcccgcctcgttccagacgcggctgtaaaccacggccccctcggagtctcttgcgcgcatcaccacctgagcgaggttaagctccacgtgtctggtgaagaccgcatagttgcataggcgctgaaaaaggtagttgagtgtggtggcgatgtgttcggcgacaaagaaatacatgatccatcgtctcagcggcatttcgctgacatcgcccagagcttccaagcgctccatggcctcgtagaagtccacggcaaaattaaaaaactgggagtttcgcgcggacacggtcaattcctcctcgagaagacggatgagttcggctatggtggcccgtacttcgcgttcgaaggctcccggcatctcttcttcctcttctatctcttcttccactaacatctcttcttcgtcttcaggcgggggcggagggggcacgcggcgacgtcgacggcgcacgggcaaacggtcgatgaatcgttcaatgacctctccgcggcggcggcgcatggtttcagtgacggcgcggccgttctcgcgcggtcgcagagtaaaaacaccgccgcgcatctccttaaagtggtgactgggaggttctccgtttgggagggaaagggcgctgattatacattttattaattggcccgtagggactgcgcgcagagatctaatcgtgtcaagatccacgggatctgaaaacctttcaacgaaagcgtctaaccagtcacagtcacaaggtaggctgagtacggcttcttgtgggcgggggtggttatgtgttcggtctgggtcttctattccttcttcatctcgggaaggtgagacgatgctgctggtgatgaaattaaagtaggcagttctaagacggcggatggtggcgaggagcaccaggtctttgggtccggcttgctggatacgcaggcgattggccattccccaagcattatcctgacatctagccagatctttgtagtagtcttgcatgagccgttctacgggcacttcttcttcacccgttctgccatgcatacgtgtgagtccaaacccgcgcattggttggaccagtgccaagtcagctacaactctttcggcgaggatggcttgctgtacttgggtgagggtggcttgaaagtcatcaaaatccacgaagcggtggtaagccccggtattgatggtgtaagcacagttggccatgactgaccagttaactgtttggtgaccatggcgcacgagctcggtgtatttaaggcgcgaataggcgcgggtgtcaaaaatgtaatcgttgcaggtgcgcaccagatactggtaccctataagaaaatgcggtggtggttggcggtagagaggccattgttctgtagctggagcgccgggggcgaggtcttccaacataaggcggtgatagccgtagatgtacctggacatccaggtgattcctgcggcggtagtggaagcccgaggaaactcgcgtacgcggttccaaatgttgcgtagcggcatgaagtagttcattgtaggcacggtttgaccagtgaggcgcgcgcagtcattgatgctctatagacacgaagaaaatgaaagcgttcagcgactcgactctgtagcctggaggaacgtgaacgggttgggtcgcggtgtaccccggttcaagacttgtactcgagccggccggagccgcggctaacgtggtattggcactcccgtctcgacccagcctacaaaaatccaggatacggaatcgagtcgttttgctggttgctgaatggcagggaagtgagtcctatttttttttttgccgctcagatgcatcccgtgctgcgacagatgcgtccccaacaacagcccccctcgcagcagcagcaaccacaaaaggctgtccctgcaactactgcaactgccgccgtgagcggtgcgggacagcccgcctatgatctggacttggaagagggcgaaggactggcacgtctaggtgcgccctcgcccgagcggcatccgcgagttcaactgaaaaaagattctcgcgaggcgtatgtgccccaacagaacctatttagagacagaagcggcgaggagccggaggagatgcgagcttcccgctttaacgcgggtcgtgagctgcgtcacggtttggaccgaagacgagtgttgcgggacgaggatttcgaagttgatgaagtgacagggatcagtcctgccagggcacacgtggctgcagccaaccttgtatcggcttacgagcagacagtaaaggaagagcgtaacttccaaaagtcttttaataatcatgtgcgaaccctgattgcccgcgaagaagttactcttggtttgatgcatttgtgggatttgatggaagctatcattcagaaccctactagcaaacctctgaccgcacagctgtttctggtggtgcaacacagcagagacaacgaggctttcagagaggcactgctcaacatcactgaacccgaggggagatggttgtatgatcttatcaacattctacagagtatcatagtgcaggagcggagcctgggcctggccgaaaaggtggctgccatcaattactcggttttaagtttgggaaaatattacgctcgcaagatctacaagactccatacgttcccatagacaaggaggtgaagatagatgggttctacatgcgtatgacgctcaaggtcttgaccctgagcgatgatcttggggtgtaccgcaatgacagaatgcatcgcgccgttagcgccagtaggaggcgcgagttaagcgacagggaactgatgcacagtttgcaaagagctctgactggagctggaacagagggtgagaattactttgacatgggagctgacttgcagtggcagcctagtcgcagggctctgagcgccgcgacggcaggatgtgagcttccttacatagaagaggcggatgaaggcgaggaggaagagggcgagtacttggaagactgatggcacaacccgtgttttttgctagatggaacagcaagcaccggatcccgcaacgcgggcggcgctgcagagccagccgtccggcattaactcctcggacgattggacccaggccatgcaacgtatcatggcgttgacgactcgcaaccccgaagcctttagacagcaaccccaggccaaccgtctatcggccatcatggaagctgtagtgccttcccgctctaatcccactcatgagaaggtcctggccattgtaaacgcgttggtggagaacaaagctattcgtccagatgaggccggactggtatacaacgctcttttagaacgcgtggctcgctacaacagtagcaatgtgcaaaccaatttggaccgtatgataacagatgtacgcgaagccgtgtctcagcgtgaaaggttccagcgcgatgccaaccttggttcgctggtggcgttaaatgcttttttgagtactcagcctgctaatgtgccgcgtggtcaacaggattatactaactttttgagtgcgttgagactgatggtatctgaagtacctcagagcgaagtgtatcagtccggacctgactacttctttcagactagcagacagggtttgcagacggtaaatctgagccaagcttttaaaaaccttaaaggtttgtggggagtgcatgccccggtaggagaaagagcaaccgtgtctagcttgttaactccaaactcccgcctattactactgttggtagctcctttcaccgacagcggcagcatcgaccgtaattcctatttgggttacctactaaacctgtatcgcgaagccatagggcaaagccaggtggacgagcagacctatcaagaaattacccaagtcagtcgcgctttgggtcaggaagacactggcagtttggaagccactctgaacttcttgcttaccaatcggtctcagaagatccctcctcaatatgctcttactgcggaggaggagaggatccttagatatgtgcagcagagcgtgggattgtttctgatgcaagagggggcaactccgactgcggcattggacatgacagcgcgaaatatggagcccagcatgtatgccagtaaccggcctttcattaacaaactgctggactacttgcacagagctgccgctatgaactctgattattttaccaatgccatcctaaacccgcactggctgcccccacctggtttctacacgggcgaatatgacatgcccgaccctaatgacgggtttctgtgggacgacgtggacagtaatgttttttcacctctttttgatcatcgcacgtggaaaaaggaaggcggcgatagaatgcattcttctgcatcgctgtccggggtcatgggtgctaccgcggctgagcccgagtctgcaagtccttttcctagtctacccttttctctacacagtgtacgtagcagcgaagtgggtagaataagtcgcccgagtttaatgggcgaagaggaatacctaaacgattccttgctcagaccggcgagagaaaaaaatttcccaaacaatggaatagaaagtttggtggataagatgagtagatggaagacttatgctcaggatcacagagacgagcctgggatcatggggactacaagtagagcgagccgtagacgccagcgtcatgacagacagaggggtcttgtgtgggaagatgaggattcggccgatgatagcagcgtgttggacttgggtgggagaggaaggggcaacccgtttgctcatttgcgccctcgcttgggtggtatgttgtaaaaaaaaaataaaaaggaaaactcaccaaggccatggcgacgagcgtacgttcgttcttctttattatttgtgtctagtataatgaggcgagtcgtgctaggcggagcggtggtgtatccggagggtcctcctccttcgtacgagagcgtgatgcagcagcagcaggcgacggcggtgatgcaatccccactggaggctccctttgtacctccgcgatacctggcacctacggagggcagaaacagcattcgttactcggaactggcacctcagtacgataccaccaggttgtatctggtggacaacaagtcggcggacattgcttctctgaactatcagaatgaccacagcaacttcttgaccacggtggtgcagaacaatgactttacccctacggaagccagtacccagaccattaactttgatgaacgatcgcggtggggcggtcagctaaagaccatcatgcatactaacatgcccaacgtaaacgagtatatgtttagtaacaacttcaaagcgcgtgtgatggtgtccagaaaacctcccgaaggtgctgcagttggggatacatatgatcacaagcaggatattttggaatatgagtggttcgagtttactttgccagaaggcaacttttcagttactatgaccattgatttgatgaacaatgccatcatagataactacttgaaagtgggcagacagaatggagtgcttgaaagtgacattggtgttaagttcgacaccaggaacttcaagctgggatgggatcccgaaaccaagttgattatgcctggagtgtatacgtatgaagcctttcatcctgacattgtcttactgcctggctgtggagtggactttaccgaaagtcgtttgagcaaccttcttggtatcagaaaaaaacagccatttcaagagggttttaagattttgtatgaagatttagaaggaggtaatattccggccctcttggatgtagatgcctatgagaacagtaagaaagaacaaaaagccaaaatagaagctgctgcggaagctaaggcaaacatagttgccagcgactctacaagggttgctaacgctggagaggtcagaggagacaattttgcaccaacacctgttccgactgcagaatcattattggccgatgtaactggaggaacggacgtgaaactcactattcaacctgtagaaaaagatagtaagaatagaagctataatgtgttggaagataaaatcaacacagcctatcgcagttggtacctttcgtacaattatggcgatcccgaaaaaggagtgcgttcctggacattgctcaccacctcagatgtcacctgcggagcagagcaggtctactggtcgcttccagacatgatgcaggatcctgtcactttccgctccactagacaagtcagcaactaccctgtggtgggtgcagagcttatgcccgtcttctcaaagagcttctacaacgaacaagctgtgtactcccagcagctccgccagtccacctcgcttacgcacgtcttcaaccgctttcctgagaaccagattttaatccgtccgccggcgcccaccattaccaccgtcagtgaaaacgttcctgctctcacagatcacgggaccctgccgttgcgcagcagtatccggggagtccaacgtgtgaccgttactgacgccagacgccgcacctgtccctacgtgtacaaggcactgggcatagtcgcaccgcgcgtcctttcaagccgcactttctaaaaaaatgtccattcttatctcgcccagtaataacaccggttggggtctgcgcgctccaagcaagatgtacggaggcgcacgcaaacgttctacccaacatcccgtgcgtgttcgcggtcattttcgcgctccatggggtgccctcaagggccgcactcgcgttcgaaccaccgtcgatgatgtaatcgatgaggtggttgccgacgcccgtaattatactcctactgcgcctacatctactgtggatgcagttattgacagtgtagtggctgacgctcgcaactatgctcgacgtaagagccggcgaaggcgcattgccagacgccaccgagctaccactgccatgcgagccgcaagagctctgctacgaagagctagacgcgtgggacgaagagccatgcttagggcggccagacgtgcagcttcgggcgccagcgccggcaggtcccgcaggcaagcagccgctgtcgcagcggcgactattgccgacatggcccaaacgcgaagaggcaatgtatactgggtgcgtgacgctgccaccggtcaacgtgtacccgtgcgcacccgtccccctcgcacttagaagatactgagcagtctccgatgttgtgtcccagcggcgaggatgtccaagcgcaaatacaaggaagaaatgctgcaggttatcgcacctgaagtctacggccaaccgctgaaggatgaaaaaaaaccccgcaaaatcaagcgggctaaaaaggacaaaaaagaagaggaagatggcgatgatgggctggcggagtttgtgcgcgagtttgccccacggcgacgcgtgcaatggcgtggacgcaaagttcgacatttgttgagacctggaacttcggtggtctttacacccggcgagcgttcaagcgctacttttaagcgttcctatgatgaggtgtacggggatgatgatattcttgagcaggcggctgaccgattaggcgagtttgcttatggcaagcgtagtagaataaatcccaaggatgagacagtgtccatacccttggatcatggaaatcccacccctagtcttaaaccggtcactttgcagcaagtgttacccgtaactccgcgaacaggtgttaaacgcgaaggtgaagatttgtatcccactatgcaactaatggtacccaaacgccaaaagttggaggacgttttggagaaagtaaaagtggatccagatattcaacctgaggttaaagtgagacccattaagcaggtagcgcctggtctgggagtacaaactgtagacattaagattcccactgaaagtatggaagtgcaaactgaacccgcaaagcctactgccacctccactgaagtgcaaacggatccatggatgccgatgcctattacaactgacgccgccggtcccactcgaagatcccgacgaaagtacggtccagcaagtctgttgatgcccaactatgttgtacacccatctattattcctactcctggttaccgaggcactcgctactatcgcagccgaaacagtacctcccgccgtcgccgcaagacacctgcaaatcgcagtcgtcgccgtagacgcacaagcaaaccgactcccggcgccctggtgcggcaagtgtaccgcaatagtagtgcggaacctttgacactgccgcgtgcgcgttaccatccaagtatcatcacttaatcaatgttgccgctgcctccttgcagatatggccctcacttgtcgccttcgcgttcccatcactggttaccgaggaagaaattcgcgccgtagaagagggatgttggggcgcggaatgcgacgctacaggcgacggcgtgctatccgcaagcaattgcggggtggttttttgccagccttaattccaattatcgctgctgcaattggcgcgataccaggcatagcttccgtggcggttcaggcctcgcaacgacattgacattggaaaaaaaagtataaataaaaaaaaaaatacaatggactctgacactcctggtcctgtgactatgttttcttagagatggaagacatcaatttttcatccttggctccgcgacacggcacgaagccgtacatgggcacctggagcgacatcggcacgagccaactgaacgggggcgccttcaattggagcagtatctggagcgggcttaaaaattttggctcaaccataaaaacatacgggaacaaagcttggaacagcagtacaggacaggcgcttagaaataaacttaaagaccagaactttcaacaaaaagtagtcgatgggatagcttccggcatcaatggagtggtagatttggctaatcaggctgtgcagaaaaagataaacagtcgtttggacccgccgccagcaaccccaggtgaaatacaagtggaggaagaaattcctccgccagaaaaacgaggcgacaagcgtccgcgtcccgatttggaagagacgctggtgacgcgcgtagatgaaccgccttcttatgaggaagcaacgaagcttggaatgcccaccactagaccgatagcccctatggctaccggggtaatgaaaccttctcagttgcatcgacccgtcactttggatttgccccctccccctgctgctactgctgtacccgcttctaagcctgtcgctgccccgaaaccagtcgccgtagccaggtcacgtcccgggggcgctcctcgtccaaatgcgcactggcaaaatactctgaacagcatcgtgggtctaggcgtgcaaagtgtaaaacgccgtcgctgcttttaattaaatatggagtagcgcttaacttgcctatctgtgtatatgtgtcattacacgccgtcacagcagcagaggaaaaaaggaagaggtcgtgcgtcgacgctgagttactttcaagatggccaccccatcgatgctgccccagtgggcatacatgcacatcgccggacaggatgcttcggagtacctgagtccgggtctggtgcagttcgcccgcgccacagacacctacttcaatctgggaaataagtttagaaatcccaccgtagcgccaacccacgatgtgaccaccgaccgtagccagcggctcatgttgcgcttcgtgcccgttgaccgggaggacaatacatactcttacaaagtgcggtacaccctggccgtgggcgacaacagagtgctggatatggccagcacgttctttgacattaggggcgtgttggacagaggtcccagtttcaaaccctattctggtacggcttacaactctctggctcctaaaggcgctccaaatgcatctcagtggttggataaaggggttgaaactactgaagaacggcaaaatgaagacggggaaaatgacgaaaaagctacatacacttttggcaatgccccagtaaaagccgatgctgacattacaaaagacggactaccaataggtttggaagtcccagctgaaggtgaccctaaacctatctacgctaataagctttaccaaccagaaccccaggtgggacaggaatcgtggactgatacagatggcactgaagaaaaatacggaggcagagtacttaaaccggacactaaaatgaaaccgtgctatgggtcttttgctaaacctactaatgtgaaaggcggacaggcaaaagtgaaaacagaagaaggcaacaacattgaatatgacattgacatgaacttttttgacttaagatcacaaaaacaaggtcttaaacctaagattgtaatgtatgcagaaaatgtggacctggaatctccagatactcatgttgtgtacaaacctgaagtttcagatgctagttcaaatgctaatcttggacagcagtctatgcccaacagacccaactacattggcttcagagataattttattggtcttatgtactataacagtactggtaacatgggggtgctggctggccaagcatctcagttgaatgcagtggttgacttgcaggacagaaacacagaactgtcttaccaactcttgcttgactccctgggcgatagaaccagatactttagcatgtggaatcaggctgttgacagttatgatcccgatgtgcgtgttattgaaaatcatggtgtggaagatgaacttcccaactactgttttccactggacggcatcggtccgcgaacagatagttacaaggagattcagttaaatggagaccaagcttggaaagatgtaaatccaaatggtatcagtgaacttgttaagggaaatccatttgccatggaaattaaccttcaagccaatctatggcgaagtttcctttattccaatgtggctctgtatctcccagactcgtacaaatacaccccgtccaatgtcactcttccagaaaacaaaaacacctacgactacatgaacgggcgggtggtgccgccatctctagtagacacctatgtgaacattggcgccaggtggtctctggatgctatggacaatgtcaacccattcaaccaccaccgtaacgctggcttgcgttaccgatccatgcttttgggtaacggacgttatgtgcctttccacatacaagtgcctcaaaaattcttcgctgtcaaaaacctgctgcttctcccaggctcctacacttatgagtggaacttcaggaaggatgtgaacatggtgctacagagttccctcggtaacgacctacgggtagatggcgccagcatcagtttcacgagcatcaacctctatgctacctttttccccatggctcacaacaccgcttccacccttgaagccatgctgcggaatgacaccaatgatcagtcattcaacgactatctatctgcagctaacatgctctatcccattcctgccaatgcaaccaatattcccatttccattccttctcgcaactgggcggctttcagaggctggtcatttaccagactcaaaaccaaagaaactccctctttggggtctggatttgacccctactttgtctattctggttctattccctacctggatggtaccttctacctgaaccacacttttaagaaggtttccatcatgtttgactcttcagtgagctggcctggaaatgacaggttactatctcccaacgaatttgaaataaagcgcactgtggatggcgaaggctacaatgtagcccaatgcaacatgaccaaagactggttcttggtacagatgctcgccaactacaacataggctatcagggcttctacattccagaaggatacaaagatcgcatgtattcatttttcagaaacttccagcccatgagcaggcaggtggttgatgaggtcaattacaaagacttcaaggccgtcgccataccctaccaacacaacaactctggctttgtgggttacatggctccgaccatgcgccaaggtcaaccctatcccgctaactatccctatccactcattggaacaactgccgtaaatagtgttacgcagaaaaagttcttgtgtgacagaaccatgtggcgcataccgttctcgagcaacttcatgtctatgggggcccttacagacttgggacagaacatgctttatgccaactcagctcatgctctggacatgacctttgaggtggatcccatggatgagcccaccctgctttatcttctcttcgaagttttcgacgtggtcagagtgcatcagccacatcgcggcatcatcgagacagtctacctgcgtacaccgttctcggccggtaacgctaccacgtaaaaagcttcttgcttcttgcaaacagcagctgcaaccatggcctgcggatcccaaaacggctccagcgagcaagagctcagagccattgtccaagacctgggttgcggaccctattttttgggaacctacgataagcgcttcccggggttcatggcccccgataagctcgcctgtgccattgtaaacacggccggacgtgagacggggggagagcactggttggctttcggttggaacccacgttctaacacctgctacctttttgatccttttggattctcggatgatcgtcttaaacagatttaccagtttgaatatgagggtctcctgcgccgcagcgctcttgctaccaaggaccgctgtattacgctggaaaaatctacccagaccgtgcagggcccccgttctgccgcctgcggacttttctgctgcatgttccttcatgcctttgtgcactggcctgaccgtcccatggacggaaaccccaccatgaaattgctgactggagtgccaaacaacatgcttcattctcctaaagtccagcccaccctgtgtgacaatcaaaaagcactctaccattttctcaatacccattcgccttattttcgctcccatcgtacacacatcgaaagggccactgcgttcgaccgtatggatgtgcaataatgactcatgtaaacaacgtgttgaataaacagcactttattttttacacgtatcaaggctctggattacttatttatttacaagtcgaatgggttctgacgagaatcagaatgacccgcgggcagtgatacgttgcggaactgatacttgggttgccacttgaattcgggaatcaccaacttgggaaccggtatatcgggtaggatgtcactccacagctttctggtcagctgcaaagctcccagcaggtcaggagccgaaatcttgaaatcacaattaggaccagtgctctgagcgcgagagttgcggtacaccggattgcagcactgaaacaccatcagcgacggatgtctcacgcttgccagcacggtgggatctgcaatcatgcccacatccagatcttcagcattggcaatgctgaacggggtcatcttgcaggtctgcctacccatggcgggcacccaattaggcttgtggttgcaatcgcagtgcagggggattagtatcatcttggcctgatcctgtctgattcctggatacacggctctcatgaaagcatcatattgcttgaaagcctgctgggctttactaccctcggtatagaacatcccgcaggacctgctcgaaaactggttagctgcgcagccggcatcattcacacagcagcgggcgtcattgttggctatttgcaccacacttctgccccagcggttttgggtgattttggttcgctcgggattctccttcaaggctcgttgtccattctcgctggccacatccatctcgataatctgctccttctgaatcataatagtgccatgcaggcacttcagcttgccctcataatcattgcagccatgaggccacaacgcacagcctgtacattcccaattatggtgggcgatctgagaaaaagaatgtatcattccctgcagaaatcttcccatcatcgtgctcagtgtcttgtgactagtgaaagttaactggatgcctcggtgctcctcgtttacgtactggtgacagatgcgcttgtattgttcgtgctgctcaggcattagtttaaaagaggttctaagttcgttatccagcctgtacttctccatcagtacacacatcacttccatgcccttctcccaagcagacaccaggggcaagctaatcggattcttaacagtacaggcagcagctcctttagccagaggatcatctttggcaatcttttcaatgcttcttttgccatccttctcaacgatgcgcacgggcgggtagctgaaacctactgctacaagctgcgcctcttctctttcttcttcgctgtcttgactgatgtcttgcatgggaacatgtttggtcttccttggcttctttttggggggtatcgggggaggaggactgtcgctccgttccggagacagggaggattgtgaagtttcgctcaccattaccaactgactgtcggtagaagaacctgaccccacacggcgacaggtgtttctcttcgggggcagaggtggaggcgattgcgaagggctgcggtccgacctggaaggcggatgactggcagaaccccttccgcgttcgggggtgtgctccctgtggcggtcgcttaactgatttccttcgcggctggccattgtgttctcctaggcagagaaacaacagacatggaaactcagccattgctgtcaacatcgccacaagtgccatcacatctcgtcgtcagcgacgaggaaaaggagcagagcttaaccattccaccgcccagtcctgccaccacctctaccctagaagataaggaggtcgacgcatctcatgacatgcagaataaaaaagcgaaagagtctgaaacagacatcgagcaagacccgggctatgtgacaccggtggaacacgaggaagagttgaaacgctttctagagagagaggatgaaaactgcccaaaacagcaagcggataactatcaccaagatgctggaaatagggatcagaacaccgactacctcatagggcttgacggggaagacgcgctccttaaacatctagcaagacagtcactcatagtcaaggatgcattattggacagaactgaagtgcccatcagtgtggaagagctcagccgcgcctacgagcttaaccttttttcacctcgtactccccccaaacgccagccaaacggcacctgcgagccaaatcctcgcttaaacttttatccagcttttgctgtgccagaagtactcgctacttatcacatcttttttaaaaatcaaaaaattccagtctcctgccgcgctaatcgcacccgcgctgacgccctacttaatctgggacctggttcacgcttacctgatatagcttccttggaagaggttccaaaaatcttcgagggtctgggcaataatgagactcgggccgcaaatgctctgcaaaagggagaaaatggcatggatgagcatcacagcgttctggtggaattggagggcgataatgccagactcgcagtactcaagcgaagcgtcgaggtcacacactttgcataccccgctgtcaacctgccccctaaagttatgacggcggtcatggaccagttactcattaagcgcgcaagtcccctttcagaagacatgcatgacccagacgcctgtgatgagggtaaaccagtggtcagtgatgagcagctaacccgatggctggacaccgactctccccgggatttggaagagcgtcgcaagcttatgatggccgtagtgctggttaccgtagaactagagtgtctccggcgtttctttaccgattcagaaaccttgcgcaaactcgaagagaatctgcactacacttttagacacggctttgtgcggcaggcgtgcaagatatctaacgtggaactcaccaacctggtttcctacatgggtattctgcatgagaatcgtctaggacaaagcgtgctgcacagcacccttaagggggaagcccgccgtgattacatccgcgattgtgtctatctctacctgtgccacacgtggcaaaccggcatgggtgtatggcagcaatgtttagaagaacagaacttgaaagagcttaacaagctcttacagaaatctcttaaggttctgtggacagggttcgacgagcgcaccgtcgcttccgacctggcagacctcatcttcccagagcgtcttagggttactttgcgaaacggactgcctgactttatgagccagagcatgcttaacaattttcgctctttcatcctggaacgctccggtatcctgcccgccacctgctgcgcactgccctccgactttgtgcctctcacctaccgcgagtgccccccgccgctatggagtcactgctacctgttccgtctggccaactacctctcctaccactcggatgtgatcgaggatgtgagcggagacggcttgctggagtgtcactgccgctgcaatctgtgcacgccccaccggtccctagcttgcaacccccagttgatgagcgaaacccagataataggcacctttgaactgcaaggccccagcagccaaggcgatgggtcttctcctgggcaaagtttaaaactgaccccgggactgtggacctctgcctacttgcgcaagtttgccccggaagattaccacccctatgaaatcaagttctatgaggaccaatcacagcctccaaaggccgaactttcggcctgcgtcatcacccagggggcaattctagcccaattgcaagccatccaaaaatcccgccaagaatttctactgaaaaagggtaagggggtctaccttgacccccagaccggcgaggaactcaacacaaggttccctcaggatgtcccaacgacgagaaagcaagaagttgaaggtgcagccgccgcccccagaagatatggaggaagattgggacagtcaggcagaggaagcggaggaggacagtctggaggacagtctggaggaagacagtttggaggaggaaaacgaggaggcagaggaggtggaagaagtaaccgccgacaaacagttatccccggctgcggagacaagcaacagcgctatcatctccgctccgagtcgaggaacgcggcggcgtcccagcagtagatgggacgagaccggacgcttcccgaacccaaccaccgcttccaagaccggtaagaaggatcggcagggatacaagtcctggcgggggcataagaatgccatcatctcctgcttgcatgagtgcgggggaaacatatccttcacgcgacgctacttgctattccaccatggggtgaactttccacgcaatgttttgcattactaccgtcacctccacagcccctactatagccagcaaatcccggcaatctcgacagaaaaagacagcggcggcgacctccaacagaaaaccagcagcggcagttaaaaaatacacaacaagtgcagcaacaggaggattaaagattacagccaacgagccagcgcaaacccgagagctaagaaatcggatctttccaaccctgtatgccatcttccagcagagtcggggccaagagcaggaactgaaaataaaaaaccgatctttgcgttcgctcaccagaagttgtttgtatcacaagagcgaagatcaacttcagcgcactcttgaggacgccgaggctctcttcaacaagtactgcgcgctgactcttaaagagtaggcagcgaccgcgcttattcaaaaaaggcgggaattacatcatcctcgtcatgagtaaagaaattcccacgccttacatgtggagttatcagccccaaatgggattggcggcaggcgcctcccaggactactccacccgcatgaattggctcagcgccgggccttctatgatttctcgagttaatgatatacgcgcctaccgaaaccaaatacttttggaacagtcagctcttaccaccacgccccgccaacaccttaatcccagaaattggcccgccgccctagtataccaggaaagtcccgctcccaccactgtattacttcctcgagacgcccaggccgaagtccaaatgactaatgcaggtgcgcagttagctggcggctccaccctatgtcgtcacaggcctcggcataatataaaacgcctgatgattagaggccgaggtattcagcttaacgacgagtcggtgagctctccgcttggtctacgaccagacggaatctttcaaattgccggctgcgggagatcttccttcacccctcgtcagactgttttgactttggaaagttcgtcttcgcaaccccgctcgggcggaatcgggaccgttcaatttgtggaggagtttactccctctgtctacttcaaccctttctccggatctcctgggcactacccggacgagttcataccgaactttgacgcaattagcgagtcagtggacggctacgattgatgtctggtgacgcggctgagctatctcggctgcgacatctagaccactgccgccgctttcgctgttttgcccgggaactcattgagttcatttacttcgaactccccaaggatcaccctcaaggtccggcccacggagtgcggattactatcgaaggtaaaataaactctcgcctgcatcgaattttctcccagcggcccgtgctgatcgagcgagaccagggaaacaccacggtttctatctactgcatttgtaatcacccaggattgcatgaaagcctttgctgtcttatgtgtactgagtttaataaaaactgaattaagactctcctacggactgccgcttcttcaacccggattttacaaccagaagaacgaaacttttcctctcatccaggactctgttaactttacctttcctacttacaaaccagaagctcaacgacaacaccgcttttccagaagcattttccctactaatactactttcaaaaccggaggtgagctccacagtctccccgcagaaaacccttgggtggaagcgggccttgtagtgctaggaattcttgcgggcgggcttgtgattattctttgctacctatacacaccttgcttcactttcctagtggtgttgtggtattggtttaaaaaatggggcccatactagtcttgcttgttttactttcgcttttgggaccgggttctgccaactacaacactcaccacctccaattccgccgaggatctgcttgatatggacggccgcgtctcagaacagcgactcgcccaactacgcatccgccagcagcaggaacgcgtggccaaagagctcagagatgtcatccaaattcaccaatgcaaaaaaggcatattctgtttggtaaaacaagccaaaatatcctacgagatcaccgctaccgaccatcgcctctcttacgagcttggcccccaacgacaaaaatttacctgcatggtgggaatcaaccccatagttatcacccaacaaagtggagatactaagggttgcattcactgctcctgcgattccatcgagtgcacctacaccctgctgaagaccctatgcggactaagagacctgctacccatgaattaaaaaaatgattaataaaaaatcacttacttaaaatcagcaataaggtctctattgaaattttctcccagcagcacctcacttccctcttcccaactctggtattctaaaccccgttcagcggcatactttctccatactttaaaggggatgtcaaattttagctcctctcctgtacccacaatcttcatctctttcttcccagatgaccaagagagtccggctcagtgactccttcaaccctgtctacccctatgaagatgaaagcacctcccaacacccctttataaacccagggtttatttccccaaatggcttcacccaaagcccagacggagttcttactttaaaatgtttaaccccgctaacaaccacaggcgggtctctacagctaaaagtgggagggggacttacagtagatgacactgatgggaccttacaagaaaacataggtgccaccacaccacttgttaagactgggcactctataggtttatccctaggagccggattgggaacagatgaaaataaactttgtaccaaattgggagaaggacttacattcaattcaaacaacatttgcattgatgacaatattaacaccctgtggacaggagttaaccccaccgaagccaactgtcaaatgatggactccagtgaatctaatgattgcaaattaattctaacactagttaaaactggagccctagtcactgcatttgtttatgttataggagtatctaacaattttaatatgctaactacatacagaaatataaattttactgcggagctgttttttgattctgcgggtaatttactaactagcctgtcatccctaaaaactccacttaatcataaatcaggacaaaacatggctactggtgccattactaatgctaaaagtttcatgcccagcacaactgcttatcctttcaataataattctagagaaaaagaaaactacatttacggaacttgtcactacacagctagtgatcacactgcttttcccattgacatatctgtcatgcttaaccaaagagcaataagagctgatacatcatattgtattcgtataacttggtcctggaacacaggagatgccccagaggggcaaacctctgctacaaccctagttacctccccatttaccttttactacatcagagaagacgactgacaaataaagtttaacttgtttatttgaaaatcaattcacaaactccgagtagttattttgcctcccccttcccatttaacagaatataccaatctctccccacgcacagctttaaacatttggataccattagagatagacatggttttagattccacattccaaacagtttcagagcgagccaatctggggtcagtgatagataaaaatccatcgggatagtcttttaaagcgctttcacagtccaactgatgcggatgcgactccggagtctggatcacggtcatctggaagaagaacgatgggaatcataatccgaaaacgggatcgggcgattgtgtctcatcaaacccacaagcagccgctgtctgcgtcgctccgtgcgactgctgtttatgggatcgggatccacagtgtcctgaagcatgattttaatagcccttaacattaactttctggtgcgatgcgcgcagcaacgcattcttatttcacttagattaatacagtaggtacagcacattatcacaatattgtttaataaaccataattaaaagcactccagccaaaactcatatctgatataatcgcccctgcatgaccatcataccaaagtttaatataaattaaatgacgttccctcaaaaacacactacccacatacatgatctcttttggcatgtgcatattaacaatctgtctgtaccatggacaacgttggttaatcatgcagcccaatataaccttccggaaccacactgccaacaccgctcccccagccatgcattgaagtgaaccctgctgattacaatgacaatgaagaatccaattctctcgaccgtgaatcacttgagaatgaaaaatatctatagtagcacaacatagacataaatgcatgcatcttctcataatttttaactcctcaggatttagaaacatatcccaaggaataggaagctcttgcagaacagtaaagctggcagaacaaggaagaccacgaacacaacttacactatgcatagtcatagtatcacaatctggcaacagcgggtggtcttcagtcatagaagctcgggtttcattttcctcacaacgtggtaactgggctctggtgtaaggatgatgtctggcgcatgatgtcgagcgtgcgcacaaccttgtcataatggagttgcttcctgacattctcgtattttgtatagcaaaacgcggccctggcagaacacactcttcttcgccttttatcctgccgcttagcgtgttccgtgtgatagttcaagtacagccacactcttaagttggtcaaaagaatgctggcttcagttgtaatcaaaactccatcacatctaatcgttctgaggaaatgatccacggtagcatatgcaaatcccaaccaagcaatgcaactggattgcgtttcaagcaggagaggagagggaagagacggaagaaccatgttaatttttattccaaacgatctcgcagtacttcaaattgtagatcgcgcagatggcatctgtcgcccccactgtgttggtgaaaaagcacagctagatcaaaagaaatgcgattttcaaggtgctcaacggtggcttccagcaaagcctccacgcgcacatccaagaacaaaagaataccaaaagaaggagcattttctaactcctcaatcatcatattacagtcctgcaccattcccagataattttcagctttccagccttggattattcgtgtcatttcttgtggtaaatccaatccacacattacaaacaggtcccggagggcgccctccaccaccattcttaaacacaccctcataatgacaaaatatcttgctcctgtgtcacctgtagcaaattgagaatggcaacatcaattgacatgccgttggctctaagttcttctctaagttctagttgtaaatactctttcatattatcaccaaactgcttagccagaagccccccgggaacaagagcaggacacgctacagtgcagtacaagcgcagacctccccaattggctccagcaaaaacaagattggaataagcatattgggaaccaccagtaatgtcatcaaagttgctggaaatataatcaggcagagtttgttgtaaaaattgaataaaagaaaaatttgccaaaaaaacattcaaaacctctgggatgcaaatgcaataagttaccgcgctgcgctccaacattgttagttttgaatgagtctgcaaaaaataaaaaaacaagcgtcatatcagagtagcctgacgaacaggtggataaatcagtctttccatcacaagacaagccacagggtctccagcccgaccctcgtaaaacctgtcatcgtgattaaacaacagcaccgaaagttcctcgcggtgaccagcatgaataattcttgatgaagcatacaatccaaacatgttagcatcagttaaagacaaaaaacagccaatatagcctctgggtataattatgcttaatcgtaaatatagcaaagccacccctcgcggatacaaagtaaaaggcacaggagaataaaaaatataattattcctttgctgctgttcaggcaacgtcgcccccggtccctctaaatacacatacaaagcctcatcagccatggcttaccagacaaagtacagcaggcacacaaagcacaagctctaaagtcactcaccaacctgtccacagtatatatacacaaaccctaaactgacgtaatggggctaaagtacacaaaatcccgccaaacccaacacacaccccgaaactgcgtcaccacaaaagtacagtttcacttccgcaatcccaacaagcggcacttcctctttctcacgggacgtcacatccgcttaacttgcaacctcattttcccacggccgcgccgccccttttagccgttaaccccacagccaattaccacacagcccacactttttaaaatcacctcatttacatattggcaccattccatctataaggtatattattgatgatggccaagctatttaggtgacactatagaatactcaagctatgcatcaagcttggtaccgagctcggatccactagtaacggccgccagtgtgctggaattcgcccttgtttaaacgcgatcg

SEQ ID NO: 11 - DNA, 35441 bp, Adenovirus B14b
  MISC_FEATURE (1)..(35441): Complete Genome
ctgcaggttaattaaggaagggcgaattctgcagatatccatcacactggcggccgctcgagcatgcatctagagggcccaattcgccctatagtgagtcgtattacaattcactggcccatcatcaataatataccttatagatggaatggtgccaatatgtaaatgaggtgattttaaaaagtgtgggctgtgtggtaattggctgtggggttaacggctaaaaggggcggcgcggccgtgggaaaatgacgttttttgggggtggagtgtttttgcaagttgtcgcggtaaatgtgacgcaaacaaaggctttttttttacggaactacttagtgttcccacggtatttaacaggaaatgaggtagttttggccggatgcaagtaaaaattgttcattttcgcgcgaaaactgaatgaggaagtggttttctgaataatgcggtatttatggcagggtggagtatttgttcagggccaggtagactttgacccattacgtggaggtttcgattaccgcggaggtttcgattaccgtgttttttacctaaatttccgcgtaccgtgtgaaagtcttctgtttttacgtaggtgtcagctgatcgctacggtatttatacctcagggtttgtgtcaagaggccactcttgagtgccagcgagaagagttttctcctctgcgccggcagtttaatattaaaaaaaatgagacacttgcgatttatgcctcaggaaataatttctgctgagactggaaacgaaatactggagtttgtggtgcacgccctgatgggagacgatccggagccacctgtgcagctttttgagcctcctacgcttcaggaactgtatgatttagaggtagagggatcggaggattctaatgaggaagctgtgaatggcttttttaccgattctatgcttttagctgctaatgaaggattagaattagatccgcctttggacactttcgatactccaggggtgattgtggaaagcggtacaggtgtaagaaaattacctgatttgggttccgtggactgtgatttgcactgctatgaagacgggtttcctttgagtgatgaggaggaccatgaaaaggagcagtctatgcagactgcagcgggtgagggagtgaaggctgccattggttttcagttggattgcccggagcttcctggacatggctgtaagtcttgtgaatttcacaggaaaaatactggagtaaaggaactgttatgttcgctttgttatatgagagcgcactgccactttatttacagtaagtgtgtttaagttaaaatttaaaggaatatgctgtttttcacatgtatattgagtgggaaatttgtgcttcttattataggtcctgtgtctgatgctgatgagtcaccatctcctgattctactacctcacctcctgagattcaagcacctgttcctgtggacgtgcacaagcccattcctgtaaagcttaagcctggaaaacgtccagcagtggaaaaactcgaggacttgttacagggtggggacggacctttggacttgagtacacggaaacggccaagacaataagtgttccatatccgtgtttacttaaggtgacgtcaatatttgtgtgagagtgcaatgtaataaaaatatgttaactgtttactggtttttattgctttttgggcggggactcaggtatataagtagaagcagacctgtgtggttagctcatagaagctggctttgattcatggaggtttgggccattttggaagaccttagaaagactaggcaactgttagagaacgcttcggacggagtctccggtttttggagattctggttcgctagtgaattagctagggtagtttttaggataaaacaggactataaagaagaatttgaaaagttgttggtagattgtccaggactttttgaagctcttaatttgggccatcaagttcactttaaagaaaaagttttatcagttttagacttttcgaccccaggtagaactgccgctgctgtggcttttcttacttttatattagataaatggatcccgcagactcatttcagcaggggatacgttttggatttcgtagccacagcattgtggagaacatggaaggttcgcaagatgaggacaatcttaggttactggccagtgcagcctttgggtgtagcgggaatcctgaggcatccaccggtcatgccagcggttctggaggaggaacagcaagaggacaacccgagagccggcctggaccctccagtggaggaggcggagtagctgacttgtctcctgaactgcaacgggtgcttactggatctacgtccactggacgggataggggcgttaaaagggagagggcatctagtggtactgatgctagatctgagttggctttaagtttaatgagtcgcagacgtcctgaaaccatttggtggcatgaggtccagaaagagggaagggatgaagtttctgtattgcaggagaaatattcactggaacaggtgaaaacatgttggttggagcctgaggatgattgggaggtggccattaaaaattatgccaagatagctttgaggcctgataaacagtataagattactagacggattaatatccggaatgcttgttacatatctggaaatggggctgaggtggtaatagatactccagacaagacagttattagatgctgcatgatggatatgtggcctggagtagtcggtatggaagcagtaacttttgtaaatgttaagtttaggggagatggttataatggaatagtgtttatggccaataccaaacttatattgcatggttgtagcttttttggttttaacaatacctgtgtagatgcctggggacaggttagtgtacggggatgtagtttctatgcgtgttggattgccacagctggcagaaccaagagtcaattgtctctgaagaaatgcatattccaaagatgtaacctgggcattcttaatgaaggcgaagcaagggtccgccactgcgcttctacagatactggatgttttattttaattaagggcaatgccagcgtaaagcataacatgatttgcggtgcttccgatgagaggccttatcaaatgctcacttgtgccggagggcattgtaacatgctggctactgtgcatattgtttctcatcaacgcaaaaaatggcctgtttttgatcacaatgtgttgaccaagtgtaccatgcatgcaggtgggcgtagaggaatgtttatgccttaccagtgtaacatgaatcatgtaaaagtgttgttggaaccagatgccttttccagaatgagtctaacaggaatgtttgacatgaacatgcaaatctggaagatcctgaggtatgatgatacaagatcgagggtgcgcgcatgcgaatgcggaggcaagcatgccaggttccagccggtgtgtgtagatgtgactgaagatctgagaccggatcatttggttattgcccgcactggagcagagttcggatccagtggagaagaaactgactaaggtgagtattgggaaaactttggggtgggattttcagatggacagattgagtaaaaatttgtttttctgtcttgcagctgtcatgagtggaaacgcttcttttaatgggggagtcttcagcccttatctgacagggcgtctcccatcctgggcaggagttcgtcagaatgttatgggatctactgtggatggaagacccgtccaacccgccaattcttcaacgctgacctatgctactttaagttcttcacctttggacgcagctgcagccgccgctgccgcctctgttgccgctaacactgtgcttggaatgggttactatggaagcatcctggctaattccacttcctctaataacccttctaccctgactcaggacaagttacttgtccttttggcccagctggaggctttgacccaacgtctgggtgaactttctcagcaggtggccgagttgcgagtacaaactgagtctgctgtcggcacggcaaagtctaaataaaaaaaaaaaattccagaatcaatgaataaataaacgagcttgttgttgatttaaaatcaagtgttttttatttcatttttcgcgcacggtatgccctagaccaccgatctcgatcattgagaacacggtggattttttccaaaatcctataaaggtgggattgaatgtttagatacatgggcattaggccgtctttggggtggagatagctccattgaagggattcatgctccggggtagtgttgtaaattacccagtcataacaaggtcgctgtgcatggtgttgcacaatatcttttagaagtaggctgattgccacagataagcccttggtgtaggtgtttacaaaccggttgagctgggaggggtgcattcggggtgaaattatgtgcattttggattggatttttaagttggcaatattgccgccaagatctcgtcttgggttcatgttatgaagtaccaccaagacggtgtatccggtacatttaggaaatttatcgtgcagcttggatggaaaagcgtggaaaaatttggagacacccttgtgtcctccgagattttccatgcactcatccatgataatagcaatagggccgtgggcagcagcgcgggcaaacacgttccgtgggtctgacacatcatagttatgttcctgagttaaatcatcataggccattttaataaatttgggacggagagtacccgattggggtatgaatgttccttcgggccccggagcatagttcccctcacagatttgcatttcccaagctttcagttccgagggtggaatcatgtccacctggggggctataaagaacaccgtttctggggctggggtaattagttgggatgatagcaagtttctgagcaattgagatttgccacatccggtggggccataaatgattccgattacaggttgcagttggtagtttagggaacggcaactgccgtcttctcgaagcaagggggccacctcgttcatcatttcccttacatgcatattttcccgcaccaaatccattaggaggcgctctcctcctagtgatagaagttcttgtagtgaggaaaagtttttcagcggttttagaccgtcagccatgggcattttggagagagtctgttgcaaaagttctagtctgttccacagttcagtgatgtgttctatggcatctcgatccagcagacctcctcgtttcgcgggtttggacggctcctggagtagggtatgagacgatgggcgtccagcgctgccagggttcggtccttccagggtctcaaagttcgggtcagggttgtttccgtcacagtgaaggggtgtgcgcctgcttgggcgcttgccagggtgcgcttcagactcatcctgctggtcgaaaacttgtgccgcttggcgccctgtatgtcggccaagtagcagtttaccatgagttcgtagttgagcgcctcggctgcgtggcccttggcgcggagcttacctttggaagttttcttgcataccgggcagtataggcatttcagcgcatacagcttgggcgcaaggaaaatggattctggggagtatgcatccgcgccgcaggaggcgcaaacagtttcacattccaccagccaggttaaatccggttcattggggtcaaaaacaagttttccgccatattttttgatgcgtttcttacctttggtctccatgagttcgtgtcctcgttgagtgacaaacaggctgtccgtgtccccgtagactgattttacaggcctcttttccagtggagtgcctcggtcttcttcgtataggaactctgaccactctgatacaaaggcgcgcgtccaggccagcacaaaggaggctatgtgggaggggtagcgatcgttgtcaaccagggggtccaccttttccaaagtatgcaaacacatgtcactctcttcaacatccaggaatgtgattggcttgtaggtgtatttcacgtgacctggggtcccagctgggggggtataaaagggggcggttctctgctcttcctcactgtcttccggatcgctgtccaggaacgtcagctgttggggtaggtattccctctcgaaggcgggcatgacctctgcactcaggttgtcagtttctaagaacgaggaggatttgatattgacagtgccgcttgagatgcctttcatgaggttttcgtccatttggtcagaaaacacaatttttttattgtcaagtttggtggcaaatgatccatacagggcgttggataaaagtttggcaatggatcgcatggtttggttcttttccttgtccgcgcgctctttggcagcgatgttgagttggacatattcgcgtgccaggcacttccattcggggaagatagttgtcaattcatctggcacaattctcacttgccaccctcggttatgcaaggtaattaaatccacactggtggccacctcgcctcgaaggggttcgttggtccagcagagcctacctcctttcctagaacagaaaggtggaagtgggtctagcataagttcatcgggagggtctgcatccatggtaaagattccaggaagtaaatccttatcaaaatagctgatgggagtggggtcatctaaggccatttgccattctcgagctgccagtgcgcgctcatatgggttaaggggactgccccagggcatgggatgggtgagtgcagaggcatacatgccacagatgtcatagacgtagatgggatcctcaaagatgcctatgtaggttggatagcatcgcccccctctgatacttgctcgcacatagtcatatagttcatgtgacggcgctagcagccccggacccaagttggtgcgattgggtttttctgttctgtagacaatctggcgaaagatggcgtgagaattggaagagatggtgggtctttgaaaaatgttgaagtgggcatgaggtagacctacagagtctctgataaagtgggcataagattcttcaagcttggttaccagttgggcggtgacaagtacgtccagggcgcagtagtcaagtgtttcttgaatgatgtcataacctggttggtttttcttttcccacagttcgcggttgagaaggtattcttcgcgatccttccagtactcttctagcggaaacccgtctttgtctgcacggtaagatcctagcatgtagaactgattaactgccttgtaagggcagcagcccttctctacgggtagagagtatgcttgagcagcttttcgtagcgaagcgtgagtaagggcgaaggtgtctctaaccatgactttgagaaattggtatttaaagtccatgtcgtcacaggctccctgttcccagagttggaagtctacccgtttcttgtaggcggggttgggcaaagcgaaagtaacatcgttgaagagaatcttaccggctctgggcataaaattgcgagtgatgcgaaaaggctgtggtacttccgctcgattgttgatcacctgggcagctaggacgatctcgtcgaagccgttgatgttgtgtcctacaatgtataattctatgaaacgcggcgtgcctctgacgtgaggtagcttattgagctcatcaaaggttaggtctgtagggtcagataaggcgtagtgttcaagggcccattcgtgcagatgaggatttgcatgtaggaatgatgaccaaagatccaccgccagtgctgtttgtaactggtcccgatactgacgaaaatgctggccaattgccattttttctggagtgacacagtagaaggttccgggatcttgttgccatcgatcccacttaagtttaatggctagatcgtgggccatgttgacgagacgctcttctcctgagagtttcatgaccagcatgaaaggaactagttgtttgccaaaggaccccatccaggtgtaagtttccacatcgtaggtcaggaagagtctttctgtgcgaggatgagagccgattgggaaaaactggatttcctgccaccagttggaggattggctgttgatgtgatggaagtagaagtttctgcggcgcgccgagcattcgtgtttgtgcttgtacagacggccgcagtagtcgcagcgttgcacgggttgtatctcgtgaatgagctgtacctggcttcccttgacgagaaatttcagtgggaagccgaggcctggcgattgtatctcgtgctcttctatattcgctgtattggcctgttcatcttctgtttcgatggtggtcatgctgacgagcccccgcgggaggcaagtccagacctcggcgcgggaggggcggagctgaaggacgagagcgcgcaggctggagctgtccagagtcctgagacgctgcggactcaggttagtaggtagggacagaagattaacttgcatgatcttttccagggcgtgcgggaggtttagatggtacttgatttccacaggttcgtttgtagagacgtcaatggcttgcagggttccgtgtcctttgggtgccactaccgtacctttgttttttcttttgatcggtggtggctctcttgcttcttgcatgcttaaaagcggtgacggggacgcgcgccgggcggcagcggttgttccggacccgggggcatggctggtagtggcacgtcggcgccgcgcacgggcaggttctggtactgcgctctgagaagacttgcgtgcgccaccacgcgtcgattgacgtcttgtatctgacgtctttgggtgaaagctaccggccccgtgagcttgaacctgaaagagagttcaacagaatcaatttcggtatcgttaacggcagcttgtctcagtatttcttgtacgtcaccagagttgtcctggtaggcgatctccgccatgaactgctcgatttcttcctcctgaagatctccgcgacccgctctctcgacggtggccgcgaggtcattggagatacggcccatgagttgggagaatgcattcatgcccgcctcgttccagacgcggctgtaaaccacggccccctcggagtctcttgcgcgcatcaccacctgagcgaggttaagctccacgtgtctggtgaagaccgcatagttgcataggcgctgaaaaaggtagttgagtgtggtggcgatgtgttcggcgacaaagaaatacatgatccatcgtctcagcggcatttcgctgacatcgcccagagcttccaagcgctccatggcctcgtagaagtccacggcaaaattaaaaaactgggagtttcgcgcggacacggtcaattcctcctcgagaagacggatgagttcggctatggtggcccgtacttcgcgttcgaaggctcccggcatctcttcttcctcttctatctcttcttccactaacatctcttcttcgtcttcaggcgggggcggagggggcacgcggcgacgtcgacggcgcacgggcaaacggtcgatgaatcgttcaatgacctctccgcggcggcggcgcatggtttcagtgacggcgcggccgttctcgcgcggtcgcagagtaaaaacaccgccgcgcatctccttaaagtggtgactgggaggttctccgtttgggagggaaagggcgctgattatacattttattaattggcccgtagggactgcgcgcagagatctaatcgtgtcaagatccacgggatctgaaaacctttcaacgaaagcgtctaaccagtcacagtcacaaggtaggctgagtacggcttcttgtgggcgggggtggttatgtgttcggtctgggtcttctattccttcttcatctcgggaaggtgagacgatgctgctggtgatgaaattaaagtaggcagttctaagacggcggatggtggcgaggagcaccaggtctttgggtccggcttgctggatacgcaggcgattggccattccccaagcattatcctgacatctagccagatctttgtagtagtcttgcatgagccgttctacgggcacttcttcttcacccgttctgccatgcatacgtgtgagtccaaacccgcgcattggttggaccagtgccaagtcagctacaactctttcggcgaggatggcttgctgtacttgggtgagggtggcttgaaagtcatcaaaatccacgaagcggtggtaagccccggtattgatggtgtaagcacagttggccatgactgaccagttaactgtttggtgaccatggcgcacgagctcggtgtatttaaggcgcgaataggcgcgggtgtcaaaaatgtaatcgttgcaggtgcgcaccagatactggtaccctataagaaaatgcggtggtggttggcggtagagaggccattgttctgtagctggagcgccgggggcgaggtcttccaacataaggcggtgatagccgtagatgtacctggacatccaggtgattcctgcggcggtagtggaagcccgaggaaactcgcgtacgcggttccaaatgttgcgtagcggcatgaagtagttcattgtaggcacggtttgaccagtgaggcgcgcgcagtcattgatgctctatagacacgaagaaaatgaaagcgttcagcgactcgactctgtagcctggaggaacgtgaacgggttgggtcgcggtgtaccccggttcaagacttgtactcgagccggccggagccgcggctaacgtggtattggcactcccgtctcgacccagcctacaaaaatccaggatacggaatcgagtcgttttgctggttgctgaatggcagggaagtgagtcctatttttttttttgccgctcagatgcatcccgtgctgcgacagatgcgtccccaacaacagcccccctcgcagcagcagcaaccacaaaaggctgtccctgcaactactgcaactgccgccgtgagcggtgcgggacagcccgcctatgatctggacttggaagagggcgaaggactggcacgtctaggtgcgccctcgcccgagcggcatccgcgagttcaactgaaaaaagattctcgcgaggcgtatgtgccccaacagaacctatttagagacagaagcggcgaggagccggaggagatgcgagcttcccgctttaacgcgggtcgtgagctgcgtcacggtttggaccgaagacgagtgttgcgggacgaggatttcgaagttgatgaagtgacagggatcagtcctgccagggcacacgtggctgcagccaaccttgtatcggcttacgagcagacagtaaaggaagagcgtaacttccaaaagtcttttaataatcatgtgcgaaccctgattgcccgcgaagaagttactcttggtttgatgcatttgtgggatttgatggaagctatcattcagaaccctactagcaaacctctgaccgcacagctgtttctggtggtgcaacacagcagagacaacgaggctttcagagaggcactgctcaacatcactgaacccgaggggagatggttgtatgatcttatcaacattctacagagtatcatagtgcaggagcggagcctgggcctggccgaaaaggtggctgccatcaattactcggttttaagtttgggaaaatattacgctcgcaagatctacaagactccatacgttcccatagacaaggaggtgaagatagatgggttctacatgcgtatgacgctcaaggtcttgaccctgagcgatgatcttggggtgtaccgcaatgacagaatgcatcgcgccgttagcgccagtaggaggcgcgagttaagcgacagggaactgatgcacagtttgcaaagagctctgactggagctggaacagagggtgagaattactttgacatgggagctgacttgcagtggcagcctagtcgcagggctctgagcgccgcgacggcaggatgtgagcttccttacatagaagaggcggatgaaggcgaggaggaagagggcgagtacttggaagactgatggcacaacccgtgttttttgctagatggaacagcaagcaccggatcccgcaacgcgggcggcgctgcagagccagccgtccggcattaactcctcggacgattggacccaggccatgcaacgtatcatggcgttgacgactcgcaaccccgaagcctttagacagcaaccccaggccaaccgtctatcggccatcatggaagctgtagtgccttcccgctctaatcccactcatgagaaggtcctggccattgtaaacgcgttggtggagaacaaagctattcgtccagatgaggccggactggtatacaacgctcttttagaacgcgtggctcgctacaacagtagcaatgtgcaaaccaatttggaccgtatgataacagatgtacgcgaagccgtgtctcagcgtgaaaggttccagcgcgatgccaaccttggttcgctggtggcgttaaatgcttttttgagtactcagcctgctaatgtgccgcgtggtcaacaggattatactaactttttgagtgcgttgagactgatggtatctgaagtacctcagagcgaagtgtatcagtccggacctgactacttctttcagactagcagacagggtttgcagacggtaaatctgagccaagcttttaaaaaccttaaaggtttgtggggagtgcatgccccggtaggagaaagagcaaccgtgtctagcttgttaactccaaactcccgcctattactactgttggtagctcctttcaccgacagcggcagcatcgaccgtaattcctatttgggttacctactaaacctgtatcgcgaagccatagggcaaagccaggtggacgagcagacctatcaagaaattacccaagtcagtcgcgctttgggtcaggaagacactggcagtttggaagccactctgaacttcttgcttaccaatcggtctcagaagatccctcctcaatatgctcttactgcggaggaggagaggatccttagatatgtgcagcagagcgtgggattgtttctgatgcaagagggggcaactccgactgcggcattggacatgacagcgcgaaatatggagcccagcatgtatgccagtaaccggcctttcattaacaaactgctggactacttgcacagagctgccgctatgaactctgattattttaccaatgccatcctaaacccgcactggctgcccccacctggtttctacacgggcgaatatgacatgcccgaccctaatgacgggtttctgtgggacgacgtggacagtaatgttttttcacctctttttgatcatcgcacgtggaaaaaggaaggcggcgatagaatgcattcttctgcatcgctgtccggggtcatgggtgctaccgcggctgagcccgagtctgcaagtccttttcctagtctacccttttctctacacagtgtacgtagcagcgaagtgggtagaataagtcgcccgagtttaatgggcgaagaggaatacctaaacgattccttgctcagaccggcgagagaaaaaaatttcccaaacaatggaatagaaagtttggtggataagatgagtagatggaagacttatgctcaggatcacagagacgagcctgggatcatggggactacaagtagagcgagccgtagacgccagcgtcatgacagacagaggggtcttgtgtgggaagatgaggattcggccgatgatagcagcgtgttggacttgggtgggagaggaaggggcaacccgtttgctcatttgcgccctcgcttgggtggtatgttgtaaaaaaaaaataaaaaggaaaactcaccaaggccatggcgacgagcgtacgttcgttcttctttattatttgtgtctagtataatgaggcgagtcgtgctaggcggagcggtggtgtatccggagggtcctcctccttcgtacgagagcgtgatgcagcagcagcaggcgacggcggtgatgcaatccccactggaggctccctttgtacctccgcgatacctggcacctacggagggcagaaacagcattcgttactcggaactggcacctcagtacgataccaccaggttgtatctggtggacaacaagtcggcggacattgcttctctgaactatcagaatgaccacagcaacttcttgaccacggtggtgcagaacaatgactttacccctacggaagccagtacccagaccattaactttgatgaacgatcgcggtggggcggtcagctaaagaccatcatgcatactaacatgcccaacgtaaacgagtatatgtttagtaacaacttcaaagcgcgtgtgatggtgtccagaaaacctcccgaaggtgctgcagttggggatacatatgatcacaagcaggatattttggaatatgagtggttcgagtttactttgccagaaggcaacttttcagttactatgaccattgatttgatgaacaatgccatcatagataactacttgaaagtgggcagacagaatggagtgcttgaaagtgacattggtgttaagttcgacaccaggaacttcaagctgggatgggatcccgaaaccaagttgattatgcctggagtgtatacgtatgaagcctttcatcctgacattgtcttactgcctggctgtggagtggactttaccgaaagtcgtttgagcaaccttcttggtatcagaaaaaaacagccatttcaagagggttttaagattttgtatgaagatttagaaggaggtaatattccggccctcttggatgtagatgcctatgagaacagtaagaaagaacaaaaagccaaaatagaagctgctgcggaagctaaggcaaacatagttgccagcgactctacaagggttgctaacgctggagaggtcagaggagacaattttgcaccaacacctgttccgactgcagaatcattattggccgatgtaactggaggaacggacgtgaaactcactattcaacctgtagaaaaagatagtaagaatagaagctataatgtgttggaagataaaatcaacacagcctatcgcagttggtacctttcgtacaattatggcgatcccgaaaaaggagtgcgttcctggacattgctcaccacctcagatgtcacctgcggagcagagcaggtctactggtcgcttccagacatgatgcaggatcctgtcactttccgctccactagacaagtcagcaactaccctgtggtgggtgcagagcttatgcccgtcttctcaaagagcttctacaacgaacaagctgtgtactcccagcagctccgccagtccacctcgcttacgcacgtcttcaaccgctttcctgagaaccagattttaatccgtccgccggcgcccaccattaccaccgtcagtgaaaacgttcctgctctcacagatcacgggaccctgccgttgcgcagcagtatccggggagtccaacgtgtgaccgttactgacgccagacgccgcacctgtccctacgtgtacaaggcactgggcatagtcgcaccgcgcgtcctttcaagccgcactttctaaaaaaatgtccattcttatctcgcccagtaataacaccggttggggtctgcgcgctccaagcaagatgtacggaggcgcacgcaaacgttctacccaacatcccgtgcgtgttcgcggtcattttcgcgctccatggggtgccctcaagggccgcactcgcgttcgaaccaccgtcgatgatgtaatcgatgaggtggttgccgacgcccgtaattatactcctactgcgcctacatctactgtggatgcagttattgacagtgtagtggctgacgctcgcaactatgctcgacgtaagagccggcgaaggcgcattgccagacgccaccgagctaccactgccatgcgagccgcaagagctctgctacgaagagctagacgcgtgggacgaagagccatgcttagggcggccagacgtgcagcttcgggcgccagcgccggcaggtcccgcaggcaagcagccgctgtcgcagcggcgactattgccgacatggcccaaacgcgaagaggcaatgtatactgggtgcgtgacgctgccaccggtcaacgtgtacccgtgcgcacccgtccccctcgcacttagaagatactgagcagtctccgatgttgtgtcccagcggcgaggatgtccaagcgcaaatacaaggaagaaatgctgcaggttatcgcacctgaagtctacggccaaccgctgaaggatgaaaaaaaaccccgcaaaatcaagcgggctaaaaaggacaaaaaagaagaggaagatggcgatgatgggctggcggagtttgtgcgcgagtttgccccacggcgacgcgtgcaatggcgtggacgcaaagttcgacatttgttgagacctggaacttcggtggtctttacacccggcgagcgttcaagcgctacttttaagcgttcctatgatgaggtgtacggggatgatgatattcttgagcaggcggctgaccgattaggcgagtttgcttatggcaagcgtagtagaataaatcccaaggatgagacagtgtccatacccttggatcatggaaatcccacccctagtcttaaaccggtcactttgcagcaagtgttacccgtaactccgcgaacaggtgttaaacgcgaaggtgaagatttgtatcccactatgcaactaatggtacccaaacgccaaaagttggaggacgttttggagaaagtaaaagtggatccagatattcaacctgaggttaaagtgagacccattaagcaggtagcgcctggtctgggagtacaaactgtagacattaagattcccactgaaagtatggaagtgcaaactgaacccgcaaagcctactgccacctccactgaagtgcaaacggatccatggatgccgatgcctattacaactgacgccgccggtcccactcgaagatcccgacgaaagtacggtccagcaagtctgttgatgcccaactatgttgtacacccatctattattcctactcctggttaccgaggcactcgctactatcgcagccgaaacagtacctcccgccgtcgccgcaagacacctgcaaatcgcagtcgtcgccgtagacgcacaagcaaaccgactcccggcgccctggtgcggcaagtgtaccgcaatagtagtgcggaacctttgacactgccgcgtgcgcgttaccatccaagtatcatcacttaatcaatgttgccgctgcctccttgcagatatggccctcacttgtcgccttcgcgttcccatcactggttaccgaggaagaaattcgcgccgtagaagagggatgttggggcgcggaatgcgacgctacaggcgacggcgtgctatccgcaagcaattgcggggtggttttttgccagccttaattccaattatcgctgctgcaattggcgcgataccaggcatagcttccgtggcggttcaggcctcgcaacgacattgacattggaaaaaaaagtataaataaaaaaaaaaatacaatggactctgacactcctggtcctgtgactatgttttcttagagatggaagacatcaatttttcatccttggctccgcgacacggcacgaagccgtacatgggcacctggagcgacatcggcacgagccaactgaacgggggcgccttcaattggagcagtatctggagcgggcttaaaaattttggctcaaccataaaaacatacgggaacaaagcttggaacagcagtacaggacaggcgcttagaaataaacttaaagaccagaactttcaacaaaaagtagtcgatgggatagcttccggcatcaatggagtggtagatttggctaatcaggctgtgcagaaaaagataaacagtcgtttggacccgccgccagcaaccccaggtgaaatacaagtggaggaagaaattcctccgccagaaaaacgaggcgacaagcgtccgcgtcccgatttggaagagacgctggtgacgcgcgtagatgaaccgccttcttatgaggaagcaacgaagcttggaatgcccaccactagaccgatagcccctatggctaccggggtaatgaaaccttctcagttgcatcgacccgtcactttggatttgccccctccccctgctgctactgctgtacccgcttctaagcctgtcgctgccccgaaaccagtcgccgtagccaggtcacgtcccgggggcgctcctcgtccaaatgcgcactggcaaaatactctgaacagcatcgtgggtctaggcgtgcaaagtgtaaaacgccgtcgctgcttttaattaaatatggagtagcgcttaacttgcctatctgtgtatatgtgtcattacacgccgtcacagcagcagaggaaaaaaggaagaggtcgtgcgtcgacgctgagttactttcaagatggccaccccatcgatgctgccccagtgggcatacatgcacatcgccggacaggatgcttcggagtacctgagtccgggtctggtgcagttcgcccgcgccacagacacctacttcaatctgggaaataagtttagaaatcccaccgtagcgccaacccacgatgtgaccaccgaccgtagccagcggctcatgttgcgcttcgtgcccgttgaccgggaggacaatacatactcttacaaagtgcggtacaccctggccgtgggcgacaacagagtgctggatatggccagcacgttctttgacattaggggcgtgttggacagaggtcccagtttcaaaccctattctggtacggcttacaactctctggctcctaaaggcgctccaaatgcatctcagtggttggataaaggggttgaaactactgaagaacggcaaaatgaagacggggaaaatgacgaaaaagctacatacacttttggcaatgccccagtaaaagccgatgctgacattacaaaagacggactaccaataggtttggaagtcccagctgaaggtgaccctaaacctatctacgctaataagctttaccaaccagaaccccaggtgggacaggaatcgtggactgatacagatggcactgaagaaaaatacggaggcagagtacttaaaccggacactaaaatgaaaccgtgctatgggtcttttgctaaacctactaatgtgaaaggcggacaggcaaaagtgaaaacagaagaaggcaacaacattgaatatgacattgacatgaacttttttgacttaagatcacaaaaacaaggtcttaaacctaagattgtaatgtatgcagaaaatgtggacctggaatctccagatactcatgttgtgtacaaacctgaagtttcagatgctagttcaaatgctaatcttggacagcagtctatgcccaacagacccaactacattggcttcagagataattttattggtcttatgtactataacagtactggtaacatgggggtgctggctggccaagcatctcagttgaatgcagtggttgacttgcaggacagaaacacagaactgtcttaccaactcttgcttgactccctgggcgatagaaccagatactttagcatgtggaatcaggctgttgacagttatgatcccgatgtgcgtgttattgaaaatcatggtgtggaagatgaacttcccaactactgttttccactggacggcatcggtccgcgaacagatagttacaaggagattcagttaaatggagaccaagcttggaaagatgtaaatccaaatggtatcagtgaacttgttaagggaaatccatttgccatggaaattaaccttcaagccaatctatggcgaagtttcctttattccaatgtggctctgtatctcccagactcgtacaaatacaccccgtccaatgtcactcttccagaaaacaaaaacacctacgactacatgaacgggcgggtggtgccgccatctctagtagacacctatgtgaacattggcgccaggtggtctctggatgctatggacaatgtcaacccattcaaccaccaccgtaacgctggcttgcgttaccgatccatgcttttgggtaacggacgttatgtgcctttccacatacaagtgcctcaaaaattcttcgctgtcaaaaacctgctgcttctcccaggctcctacacttatgagtggaacttcaggaaggatgtgaacatggtgctacagagttccctcggtaacgacctacgggtagatggcgccagcatcagtttcacgagcatcaacctctatgctacctttttccccatggctcacaacaccgcttccacccttgaagccatgctgcggaatgacaccaatgatcagtcattcaacgactatctatctgcagctaacatgctctatcccattcctgccaatgcaaccaatattcccatttccattccttctcgcaactgggcggctttcagaggctggtcatttaccagactcaaaaccaaagaaactccctctttggggtctggatttgacccctactttgtctattctggttctattccctacctggatggtaccttctacctgaaccacacttttaagaaggtttccatcatgtttgactcttcagtgagctggcctggaaatgacaggttactatctcccaacgaatttgaaataaagcgcactgtggatggcgaaggctacaatgtagcccaatgcaacatgaccaaagactggttcttggtacagatgctcgccaactacaacataggctatcagggcttctacattccagaaggatacaaagatcgcatgtattcatttttcagaaacttccagcccatgagcaggcaggtggttgatgaggtcaattacaaagacttcaaggccgtcgccataccctaccaacacaacaactctggctttgtgggttacatggctccgaccatgcgccaaggtcaaccctatcccgctaactatccctatccactcattggaacaactgccgtaaatagtgttacgcagaaaaagttcttgtgtgacagaaccatgtggcgcataccgttctcgagcaacttcatgtctatgggggcccttacagacttgggacagaacatgctttatgccaactcagctcatgctctggacatgacctttgaggtggatcccatggatgagcccaccctgctttatcttctcttcgaagttttcgacgtggtcagagtgcatcagccacatcgcggcatcatcgagacagtctacctgcgtacaccgttctcggccggtaacgctaccacgtaaaaagcttcttgcttcttgcaaacagcagctgcaaccatggcctgcggatcccaaaacggctccagcgagcaagagctcagagccattgtccaagacctgggttgcggaccctattttttgggaacctacgataagcgcttcccggggttcatggcccccgataagctcgcctgtgccattgtaaacacggccggacgtgagacggggggagagcactggttggctttcggttggaacccacgttctaacacctgctacctttttgatccttttggattctcggatgatcgtcttaaacagatttaccagtttgaatatgagggtctcctgcgccgcagcgctcttgctaccaaggaccgctgtattacgctggaaaaatctacccagaccgtgcagggcccccgttctgccgcctgcggacttttctgctgcatgttccttcatgcctttgtgcactggcctgaccgtcccatggacggaaaccccaccatgaaattgctgactggagtgccaaacaacatgcttcattctcctaaagtccagcccaccctgtgtgacaatcaaaaagcactctaccattttctcaatacccattcgccttattttcgctcccatcgtacacacatcgaaagggccactgcgttcgaccgtatggatgtgcaataatgactcatgtaaacaacgtgttgaataaacagcactttattttttacacgtatcaaggctctggattacttatttatttacaagtcgaatgggttctgacgagaatcagaatgacccgcgggcagtgatacgttgcggaactgatacttgggttgccacttgaattcgggaatcaccaacttgggaaccggtatatcgggtaggatgtcactccacagctttctggtcagctgcaaagctcccagcaggtcaggagccgaaatcttgaaatcacaattaggaccagtgctctgagcgcgagagttgcggtacaccggattgcagcactgaaacaccatcagcgacggatgtctcacgcttgccagcacggtgggatctgcaatcatgcccacatccagatcttcagcattggcaatgctgaacggggtcatcttgcaggtctgcctacccatggcgggcacccaattaggcttgtggttgcaatcgcagtgcagggggattagtatcatcttggcctgatcctgtctgattcctggatacacggctctcatgaaagcatcatattgcttgaaagcctgctgggctttactaccctcggtatagaacatcccgcaggacctgctcgaaaactggttagctgcgcagccggcatcattcacacagcagcgggcgtcattgttggctatttgcaccacacttctgccccagcggttttgggtgattttggttcgctcgggattctccttcaaggctcgttgtccattctcgctggccacatccatctcgataatctgctccttctgaatcataatagtgccatgcaggcacttcagcttgccctcataatcattgcagccatgaggccacaacgcacagcctgtacattcccaattatggtgggcgatctgagaaaaagaatgtatcattccctgcagaaatcttcccatcatcgtgctcagtgtcttgtgactagtgaaagttaactggatgcctcggtgctcctcgtttacgtactggtgacagatgcgcttgtattgttcgtgctgctcaggcattagtttaaaagaggttctaagttcgttatccagcctgtacttctccatcagtacacacatcacttccatgcccttctcccaagcagacaccaggggcaagctaatcggattcttaacagtacaggcagcagctcctttagccagaggatcatctttggcaatcttttcaatgcttcttttgccatccttctcaacgatgcgcacgggcgggtagctgaaacctactgctacaagctgcgcctcttctctttcttcttcgctgtcttgactgatgtcttgcatgggaacatgtttggtcttccttggcttctttttggggggtatcgggggaggaggactgtcgctccgttccggagacagggaggattgtgaagtttcgctcaccattaccaactgactgtcggtagaagaacctgaccccacacggcgacaggtgtttctcttcgggggcagaggtggaggcgattgcgaagggctgcggtccgacctggaaggcggatgactggcagaaccccttccgcgttcgggggtgtgctccctgtggcggtcgcttaactgatttccttcgcggctggccattgtgttctcctaggcagagaaacaacagacatggaaactcagccattgctgtcaacatcgccacaagtgccatcacatctcgtcgtcagcgacgaggaaaaggagcagagcttaaccattccaccgcccagtcctgccaccacctctaccctagaagataaggaggtcgacgcatctcatgacatgcagaataaaaaagcgaaagagtctgaaacagacatcgagcaagacccgggctatgtgacaccggtggaacacgaggaagagttgaaacgctttctagagagagaggatgaaaactgcccaaaacagcaagcggataactatcaccaagatgctggaaatagggatcagaacaccgactacctcatagggcttgacggggaagacgcgctccttaaacatctagcaagacagtcactcatagtcaaggatgcattattggacagaactgaagtgcccatcagtgtggaagagctcagccgcgcctacgagcttaaccttttttcacctcgtactccccccaaacgccagccaaacggcacctgcgagccaaatcctcgcttaaacttttatccagcttttgctgtgccagaagtactcgctacttatcacatcttttttaaaaatcaaaaaattccagtctcctgccgcgctaatcgcacccgcgctgacgccctacttaatctgggacctggttcacgcttacctgatatagcttccttggaagaggttccaaaaatcttcgagggtctgggcaataatgagactcgggccgcaaatgctctgcaaaagggagaaaatggcatggatgagcatcacagcgttctggtggaattggagggcgataatgccagactcgcagtactcaagcgaagcgtcgaggtcacacactttgcataccccgctgtcaacctgccccctaaagttatgacggcggtcatggaccagttactcattaagcgcgcaagtcccctttcagaagacatgcatgacccagacgcctgtgatgagggtaaaccagtggtcagtgatgagcagctaacccgatggctggacaccgactctccccgggatttggaagagcgtcgcaagcttatgatggccgtagtgctggttaccgtagaactagagtgtctccggcgtttctttaccgattcagaaaccttgcgcaaactcgaagagaatctgcactacacttttagacacggctttgtgcggcaggcgtgcaagatatctaacgtggaactcaccaacctggtttcctacatgggtattctgcatgagaatcgtctaggacaaagcgtgctgcacagcacccttaagggggaagcccgccgtgattacatccgcgattgtgtctatctctacctgtgccacacgtggcaaaccggcatgggtgtatggcagcaatgtttagaagaacagaacttgaaagagcttaacaagctcttacagaaatctcttaaggttctgtggacagggttcgacgagcgcaccgtcgcttccgacctggcagacctcatcttcccagagcgtcttagggttactttgcgaaacggactgcctgactttatgagccagagcatgcttaacaattttcgctctttcatcctggaacgctccggtatcctgcccgccacctgctgcgcactgccctccgactttgtgcctctcacctaccgcgagtgccccccgccgctatggagtcactgctacctgttccgtctggccaactacctctcctaccactcggatgtgatcgaggatgtgagcggagacggcttgctggagtgtcactgccgctgcaatctgtgcacgccccaccggtccctagcttgcaacccccagttgatgagcgaaacccagataataggcacctttgaactgcaaggccccagcagccaaggcgatgggtcttctcctgggcaaagtttaaaactgaccccgggactgtggacctctgcctacttgcgcaagtttgccccggaagattaccacccctatgaaatcaagttctatgaggaccaatcacagcctccaaaggccgaactttcggcctgcgtcatcacccagggggcaattctagcccaattgcaagccatccaaaaatcccgccaagaatttctactgaaaaagggtaagggggtctaccttgacccccagaccggcgaggaactcaacacaaggttccctcaggatgtcccaacgacgagaaagcaagaagttgaaggtgcagccgccgcccccagaagatatggaggaagattgggacagtcaggcagaggaagcggaggaggacagtctggaggacagtctggaggaagacagtttggaggaggaaaacgaggaggcagaggaggtggaagaagtaaccgccgacaaacagttatccccggctgcggagacaagcaacagcgctatcatctccgctccgagtcgaggaacgcggcggcgtcccagcagtagatgggacgagaccggacgcttcccgaacccaaccaccgcttccaagaccggtaagaaggatcggcagggatacaagtcctggcgggggcataagaatgccatcatctcctgcttgcatgagtgcgggggaaacatatccttcacgcgacgctacttgctattccaccatggggtgaactttccacgcaatgttttgcattactaccgtcacctccacagcccctactatagccagcaaatcccggcaatctcgacagaaaaagacagcggcggcgacctccaacagaaaaccagcagcggcagttaaaaaatacacaacaagtgcagcaacaggaggattaaagattacagccaacgagccagcgcaaacccgagagctaagaaatcggatctttccaaccctgtatgccatcttccagcagagtcggggccaagagcaggaactgaaaataaaaaaccgatctttgcgttcgctcaccagaagttgtttgtatcacaagagcgaagatcaacttcagcgcactcttgaggacgccgaggctctcttcaacaagtactgcgcgctgactcttaaagagtaggcagcgaccgcgcttattcaaaaaaggcgggaattacatcatcctcgtcatgagtaaagaaattcccacgccttacatgtggagttatcagccccaaatgggattggcggcaggcgcctcccaggactactccacccgcatgaattggctcagcgccgggccttctatgatttctcgagttaatgatatacgcgcctaccgaaaccaaatacttttggaacagtcagctcttaccaccacgccccgccaacaccttaatcccagaaattggcccgccgccctagtataccaggaaagtcccgctcccaccactgtattacttcctcgagacgcccaggccgaagtccaaatgactaatgcaggtgcgcagttagctggcggctccaccctatgtcgtcacaggcctcggcataatataaaacgcctgatgattagaggccgaggtattcagcttaacgacgagtcggtgagctctccgcttggtctacgaccagacggaatctttcaaattgccggctgcgggagatcttccttcacccctcgtcagactgttttgactttggaaagttcgtcttcgcaaccccgctcgggcggaatcgggaccgttcaatttgtggaggagtttactccctctgtctacttcaaccctttctccggatctcctgggcactacccggacgagttcataccgaactttgacgcaattagcgagtcagtggacggctacgattgatgtctggtgacgcggctgagctatctcggctgcgacatctagaccactgccgccgctttcgctgttttgcccgggaactcattgagttcatttacttcgaactccccaaggatcaccctcaaggtccggcccacggagtgcggattactatcgaaggtaaaataaactctcgcctgcatcgaattttctcccagcggcccgtgctgatcgagcgagaccagggaaacaccacggtttctatctactgcatttgtaatcacccaggattgcatgaaagcctttgctgtcttatgtgtactgagtttaataaaaactgaattaagactctcctacggactgccgcttcttcaacccggattttacaaccagaagaacgaaacttttcctctcatccaggactctgttaactttacctttcctacttacaaaccagaagctcaacgacaacaccgcttttccagaagcattttccctactaatactactttcaaaaccggaggtgagctccacagtctccccgcagaaaacccttgggtggaagcgggccttgtagtgctaggaattcttgcgggcgggcttgtgattattctttgctacctatacacaccttgcttcactttcctagtggtgttgtggtattggtttaaaaaatggggcccatactagtcttgcttgttttactttcgcttttgggaccgggttctgccaactacaatccatgtctagactttgacccagaaaactgcacacttacttttgcacccgacacaagccgcatctgtggagttcttattaagtgcggatgggaatgcaggtccgttgaaattacacacaataacaaaacctggaacaataccttatccaccacatgggagccaggagttcccgagtggtacactgtctctgtccgaggtcctgacggttccatccgcattagtaacaacacttttattttttctacaatgtgcgatctggccatgttcatgagcaaacagtattctctatggcctcccagcaaggacaacattgtaacgttctccattgcttattgcttgtgcgcttgccttcttactgctttactgtgcgtatgcatacacctgcttgtaaccactcgtatcaaaaacgccaataacaaagaaaaaatgccttaacctctttctgtttacagacatggcttttcttacagctctcatacttgtcagcattgtcactgccgctcacggacaaacagtcgtctctatccctctaggtcataattacactctcataggacccccaatcacttcagaggtcatctggaccaaactgggaagcgttgattactttgatataatctgtaacaaaacaaaaccaataatagtaacctgcaacatacaaaatcttacattaattaatgttagcaaagtttacagcggttactattatggttatgacagatacagtagtcaatatagaaattacttggttcgtgttacccagtccaaaaccacgaaaatgccaaatatggcagaaattcgatccgatgacaattctctagaaacttttacatcttccaccacacctgacgaaaaaaatatcccagattcaatgattgcaattatcgcagcggtggcagtggtgatggcactaacagtaatatgcatgcttttatatgcttgtcgctacaaaaagtttcatcctaaaaaacaagatctcctactaaggcttaacatttaatttctttttacacagccatggtttccactaccacattccttatgcttactagtatagcaactctgacttctgctcgctcacacctcactgtaactataggctcaaactgcacactaaaaggacctcaaggtggtcatgtcttttggtggagaatatatgacaatggatggtttacaaaaccatgtgaccaacctggtagatttttctgcaacggcagagacctaaccattatcaacgtgacagcaaatgacaaaggcttctattatggaaccgactataaaagtagtttagattataacattattgtactgccatccaccactccagcgccccgcaaaactactttctctagcagcagtgccgctaacaatacaatttccaatccaacctttaccgcgcttttaaaacgcactgtgaataattctacaacaatttccacttcaacaatcagcatcatcgctgccgtgacaattggaatatctattcttgtttttaccataacctactacacctgctgctataaaaaagacgaacataaaggtgatccattacttagatttgatatttaatttgttctttttttttttatttacagtatggtgaacaccaatcatggtacctagaaatttcttcttcaccatactcatctgtgcttttaatgtttgcgctactttcacagcagtagccacagcaagcccagactgtataggagcatttgcttcctatgcactttttgcttttgtcacttgcatctgcgtatgtagcatagtctgcctggttattaattttttccaacttctagactggatccttgtgcgaattgcctacctgcgccaccatcccgaataccgcaaccaaaatatcgcggcacttcttagacttatctaaaaccatgcaggctatactaccaatatttttgcttctattgcttccctacgctgtctcaaccccagctacctatagtactccaccagaacaccttagaaaatgcaaattccaacaaccgtggtcatttcttgcttgctatcgagaaaaatctgaaattcccccaactttaataatgattgctggaataattaatgtaatctgttgcaccataatttcatttctgatataccccctatttgattttggctggaatgctcccaatgcacatgattattcccaagacccagaggaacacattcccctacataacatgcaacaaccaatagcgctaatagaatacgaaagtgaaccacaacccccactactccctgctattagttacttcaacctaaccggcggagatgactgaaacactcaccacctccaattccgccgaggatctgcttgatatggacggccgcgtctcagaacagcgactcgcccaactacgcatccgccagcagcaggaacgcgtggccaaagagctcagagatgtcatccaaattcaccaatgcaaaaaaggcatattctgtttggtaaaacaagccaaaatatcctacgagatcaccgctaccgaccatcgcctctcttacgagcttggcccccaacgacaaaaatttacctgcatggtgggaatcaaccccatagttatcacccaacaaagtggagatactaagggttgcattcactgctcctgcgattccatcgagtgcacctacaccctgctgaagaccctatgcggactaagagacctgctacccatgaattaaaaaaatgattaataaaaaatcacttacttaaaatcagcaataaggtctctattgaaattttctcccagcagcacctcacttccctcttcccaactctggtattctaaaccccgttcagcggcatactttctccatactttaaaggggatgtcaaattttagctcctctcctgtacccacaatcttcatctctttcttcccagatgaccaagagagtccggctcagtgactccttcaaccctgtctacccctatgaagatgaaagcacctcccaacacccctttataaacccagggtttatttccccaaatggcttcacccaaagcccagacggagttcttactttaaaatgtttaaccccgctaacaaccacaggcgggtctctacagctaaaagtgggagggggacttacagtagatgacactgatgggaccttacaagaaaacataggtgccaccacaccacttgttaagactgggcactctataggtttatccctaggagccggattgggaacagatgaaaataaactttgtaccaaattgggagaaggacttacattcaattcaaacaacatttgcattgatgacaatattaacaccctgtggacaggagttaaccccaccgaagccaactgtcaaatgatggactccagtgaatctaatgattgcaaattaattctaacactagttaaaactggagccctagtcactgcatttgtttatgttataggagtatctaacaattttaatatgctaactacatacagaaatataaattttactgcggagctgttttttgattctgcgggtaatttactaactagcctgtcatccctaaaaactccacttaatcataaatcaggacaaaacatggctactggtgccattactaatgctaaaagtttcatgcccagcacaactgcttatcctttcaataataattctagagaaaaagaaaactacatttacggaacttgtcactacacagctagtgatcacactgcttttcccattgacatatctgtcatgcttaaccaaagagcaataagagctgatacatcatattgtattcgtataacttggtcctggaacacaggagatgccccagaggggcaaacctctgctacaaccctagttacctccccatttaccttttactacatcagagaagacgactgacaaataaagtttaacttgtttatttgaaaatcaattcacaaactccgagtagttattttgcctcccccttcccatttaacagaatataccaatctctccccacgcacagctttaaacatttggataccattagagatagacatggttttagattccacattccaaacagtttcagagcgagccaatctggggtcagtgatagataaaaatccatcgggatagtcttttaaagcgctttcacagtccaactgatgcggatgcgactccggagtctggatcacggtcatctggaagaagaacgatgggaatcataatccgaaaacgggatcgggcgattgtgtctcatcaaacccacaagcagccgctgtctgcgtcgctccgtgcgactgctgtttatgggatcgggatccacagtgtcctgaagcatgattttaatagcccttaacattaactttctggtgcgatgcgcgcagcaacgcattcttatttcacttagattaatacagtaggtacagcacattatcacaatattgtttaataaaccataattaaaagcactccagccaaaactcatatctgatataatcgcccctgcatgaccatcataccaaagtttaatataaattaaatgacgttccctcaaaaacacactacccacatacatgatctcttttggcatgtgcatattaacaatctgtctgtaccatggacaacgttggttaatcatgcagcccaatataaccttccggaaccacactgccaacaccgctcccccagccatgcattgaagtgaaccctgctgattacaatgacaatgaagaatccaattctctcgaccgtgaatcacttgagaatgaaaaatatctatagtagcacaacatagacataaatgcatgcatcttctcataatttttaactcctcaggatttagaaacatatcccaaggaataggaagctcttgcagaacagtaaagctggcagaacaaggaagaccacgaacacaacttacactatgcatagtcatagtatcacaatctggcaacagcgggtggtcttcagtcatagaagctcgggtttcattttcctcacaacgtggtaactgggctctggtgtaaggatgatgtctggcgcatgatgtcgagcgtgcgcacaaccttgtcataatggagttgcttcctgacattctcgtattttgtatagcaaaacgcggccctggcagaacacactcttcttcgccttttatcctgccgcttagcgtgttccgtgtgatagttcaagtacagccacactcttaagttggtcaaaagaatgctggcttcagttgtaatcaaaactccatcacatctaatcgttctgaggaaatgatccacggtagcatatgcaaatcccaaccaagcaatgcaactggattgcgtttcaagcaggagaggagagggaagagacggaagaaccatgttaatttttattccaaacgatctcgcagtacttcaaattgtagatcgcgcagatggcatctgtcgcccccactgtgttggtgaaaaagcacagctagatcaaaagaaatgcgattttcaaggtgctcaacggtggcttccagcaaagcctccacgcgcacatccaagaacaaaagaataccaaaagaaggagcattttctaactcctcaatcatcatattacagtcctgcaccattcccagataattttcagctttccagccttggattattcgtgtcatttcttgtggtaaatccaatccacacattacaaacaggtcccggagggcgccctccaccaccattcttaaacacaccctcataatgacaaaatatcttgctcctgtgtcacctgtagcaaattgagaatggcaacatcaattgacatgccgttggctctaagttcttctctaagttctagttgtaaatactctttcatattatcaccaaactgcttagccagaagccccccgggaacaagagcaggacacgctacagtgcagtacaagcgcagacctccccaattggctccagcaaaaacaagattggaataagcatattgggaaccaccagtaatgtcatcaaagttgctggaaatataatcaggcagagtttgttgtaaaaattgaataaaagaaaaatttgccaaaaaaacattcaaaacctctgggatgcaaatgcaataagttaccgcgctgcgctccaacattgttagttttgaatgagtctgcaaaaaataaaaaaacaagcgtcatatcagagtagcctgacgaacaggtggataaatcagtctttccatcacaagacaagccacagggtctccagcccgaccctcgtaaaacctgtcatcgtgattaaacaacagcaccgaaagttcctcgcggtgaccagcatgaataattcttgatgaagcatacaatccaaacatgttagcatcagttaaagacaaaaaacagccaatatagcctctgggtataattatgcttaatcgtaaatatagcaaagccacccctcgcggatacaaagtaaaaggcacaggagaataaaaaatataattattcctttgctgctgttcaggcaacgtcgcccccggtccctctaaatacacatacaaagcctcatcagccatggcttaccagacaaagtacagcaggcacacaaagcacaagctctaaagtcactcaccaacctgtccacagtatatatacacaaaccctaaactgacgtaatggggctaaagtacacaaaatcccgccaaacccaacacacaccccgaaactgcgtcaccacaaaagtacagtttcacttccgcaatcccaacaagcggcacttcctctttctcacgggacgtcacatccgcttaacttgcaacctcattttcccacggccgcgccgccccttttagccgttaaccccacagccaattaccacacagcccacactttttaaaatcacctcatttacatattggcaccattccatctataaggtatattattgatcggtaaaaaagccattcacagcttcctcattagaatcctccgatccctctacctctaaatcatacagttcctgaagcgtaggaggctcaaaaagctgcacaggtggctccggatcgtctcccatcagggcgtgcaccacaaactccagtatttcgtttccagtctcagcagaaattatttcctgaggcataaatcgcaagtgtctcattttttttaatattaaactgccggcgcagaggagaaaactcttctcgctggcactcaagagtggcctcttgacacaaaccctgaggtataaataccgtagcgatcagctgacacctacgtaaaaacagaagactttcacacggtacgcggaaatttaggtaaaaaacacggtaatcgaaacctccgcggtaatcgaaacctccacgtaatgggtcaaagtctacctggccctgaacaaatactccaccctgccataaataccgcattattcagaaaaccacttcctcattcagttttcgcgcgaaaatgaacaatttttacttgcatccggccaaaactacctcatttcctgtta

SEQ ID NO: 12 - DNA, 35153 bp, Adenovirus B34
  MISC_FEATURE (1)..(35153): Complete Genome
aattgctgatttgcgcgcgaaaactgaatgaggaagtgtttttctgaataatgtggtatttatggcagggtggagtatttgttcagggccaggtagactttgacccattacgtggaggtttcgattaccgtgttttttacctgaatttccgcgtaccgtgtcaaagtcttctgtttttacgtaggtgtcagctgatcgctacggtatttatacctcagggtttgtgtcaagaggccactcttgagtgccagcgagaacatcatcaataatataccttatagatggaatggtgccaatatgtaaatgaggtgattttaaaaattgtggggtgtgtggtgattggctgtggggttaacggctaaacggggcggcgcggccgtgggaaaatgacgttttgtgggggtggagtttttttgcaagttgtcgcgggaaatgtgacgcataaaaaggctttttttctcacggaactactgacttttcccacggtatttaacaggaaatgaggtagttttgaccggatgcaagtgaaaattgctgatttgcgcgcgaaaactgaatgaggaagtgtttttctgaataatgtggtatttatggcagggtggagtatttgttcagggccaggtagactttgacccattacgtggaggtttcgattaccgtgttttttacctgaatttccgcgtaccgtgtcaaagtcttctgtttttacgtaggtgtcagctgatcgctacggtatttatacctcagggtttgtgtcaagaggccactcttgagtgccagcgagaagagttttctcctctgcgccggcagtttaataataaaaaaatgagagatttgcgatttctgcctcaggaaataatttctgctgagactggaaatgaaatactggagcttgtggtgcacgccctgatgggagacgatccggagccacctgtgcagctttttgagcctcctacgcttcaggaactgtatgatttagaggtagagggatcggaggattctaatgaggaagctgtgaatggcttttttaccgattctatgcttttagctgctaatgaaggattagaattagatccgcctttggacactttcgatactccaggggtgattgtggaaagcggtacaggtgtaagaaaattacctgatttgggttccgtggactgtgatttgcactgctatgaagacgggtttcctccgagtgatgaggaggaccatgaaaaggagcagtctatgcagactgcagcgggtgagggagtgaaggctgccagtgttggttttcagttggattgcccggagcttcctggacatggctgtaagtcttgtgaatttcacaggaaaaatactggagtaaaggaactgttatgttcgctttgttatatgagagcgcactgccactttatttacagtaagtgtgtttaagttaaaatttaaaggaatatgctgtttttcacatgtatattgagtgggagttttgtgcttcttattataggtcctgtgtctgatgctgatgagtcaccatctcctgattctactacctcacctcctgagattcaagcacctgttcctgtggacgtgcgcaagcccattcctgtgaagcttaagcctgggaaacgtccagcagtggaaaaacttgaggacttgttacagggtggggacggacctttggacttgagtacacggaaacggccaagacaataagtgttccatatccgtgtttacttaaggtgacgtcaatatttgtgtgagagtgcaatgtaataaaaatatgttaactgttcactggtttttattgctttttgggcggggactcaggtatataagtagaagcagacctgtatggttagctcataggagctggctttcatccatggaggtttgggccattttggaagaccttagaaagactaggcaactgttagaggacgcttcggacggagtctccggtttttggagattctggttcgctagtgaattagctagggtagtttttaggataaaacaggactataaagaagaatttgaaaagttgttggtagattgcccaggactttttgaagctcttaatttgggccatcaagttcactttaaagaaaaagttttatcagttttagacttttcaaccccaggtagaactgccgctgctgtggcttttcttacttttatattagataaatggatcccgcagactcatttcagcaggggatacgttttggatttcgtagccacagcattgtggagaacatggaaggttcgcaagatgaggacaatcttaggttactggccagtgcagcctttgggtgtagcgggaatcctgaggcatccaccggtcatgccagcggttctggaggaggaacagcaagaggacaacccgagagccggcctggaccctccagtggaggaggcggagtagctgacttgtctcctgaactgcaacgggtgcttactggatctacgtccactggacgggataggggcgttaagagggagagggcatctagtggtactgatgctagatctgagttggctttaagtttaatgagtcgcagacgtcctgaaaccatttggtggcatgaggtccagaaagagggaagggatgaagtttctgtattgcaggagaaatattcactggaacaggtgaaaacatgttggttggagcctgaggatgattgggaggtggccattaaaaattatgccaagatagctttgaggcctgataaacagtataagattactagacggattaatatccggaatgcttgttacatatctggaaatggggctgaggtggtaatagatactcaagacaaggcagttattagatgctgcatgatggatatgtggcctggagtagtcggtatggaagcagtaacttttgtaaatgttaagtttaggggagatggttataatggaatagtgtttatggccaataccaaacttatattgcatggttgtagcttttttggtttcaacaatacctgtgtagatgcctggggacaggttagtgtacggggatgtagtttctatgcgtgttggattgccacagctggcagaaccaagagtcaattgtctctgaagaaatgcatattccaaagatgtaacctgggcattctgaatgaaggcgaagcaagggtccgccactgcgcttctacagatactggatgttttattttaattaagggcaatgccagcgtaaagcataacatgatttgcggtgcttccgatgagaggccttatcaaatgctcacttgtgccggtgggcattgtaatatgctggctactgtgcatattgtttcccatcaacgcaaaaaatggcctgtttttgatcacaatgtgttgaccaagtgtaccatgcatgcaggtgggcgtagaggaatgtttatgccttaccagtgtaacatgaatcatgtgaaagtgttgttggaaccagatgccttttccagaatgagcctaacaggaatctttgacatgaacatgcaaatctggaagatcctgaggtatgatgatacgagatcgagggtgcgcgcatgcgaatgcggaggcaagcatgccaggttccagccggtgtgtgtagatgtgactgaagatctgagaccggatcatttggttattgcccgcactggagcagagttcggatccagtggagaagaaactgactaaggtgagtattgggaaaacttggggtggggttttcagatggacagattgagtaaaaatttgttttttctgtctttcagctgtcatgagtggaaacgcttcttttaaggggggagtcttcagcccttatctgacagggcgtctcccatcctgggcaggagttcgtcagaatgttatgggatctactgtggatggaagacccgtccaacccgccaattcttcaacgctgacctatgctactttaagttcttcacctttggacgcagctgcagccgccgccgccgcctctgttgccgctaacactgtgcttggaatgggttactatggaagtatcgtggctaattccacttcctctaataacccttctaccctgactcaggacaagttacttgtccttttggcccagctggaggctttgacccaacgtctgggtgaactttatcagcaggtggccgagttgcgagtacaaactgagtctgctgtcggcacggcaaagtctaaataaaaaaaaattccacaatcaatgaataaataaacgagcttgttgttgatttaaaatcaagtgtttttatttcatttttcgcgcacggtatgccctagaccaccgatctcgatcattgagaacacggtggattttttccagaatcctatagaggtgggattgaatgtttagatacatgggcattaggccatctttggggtggagatagctccattgaagggattcatgctccggggtagtgttgtaaatcacccagtcataacaaggtcgcagtgcatggtgttgcacaatatcttttagaagtaggctgattgccacagataagcccttggtgtaggtgtttacaaaccggttgagctgggaggggtgcattcggggtgaaattatgtgcattttggattggatttttaagttggcaatattgccgccaagatctcgtcttgggttcatgttatgaaggaccaccaagacggtgtatccggtacatttaggaaatttatcgtgtagcttggatggaaaagcgtggaaaaatttggagacacccttgtgtcctccgagattttccatgcactcatccatgataatagcaatggggccgtgggcagcagcgcgggcaaacacgttccgtgggtctgacacatcatagttatgttcctgagttaaatcatcataagccattttaatgaatttggggcggagagtacccgattggggtatgaatgttccttcgggccccggagcatagttcccctcacagatttgcatttcccaagctttcagttccgatggtggaatcatgtccacctggggggctatgaagaacaccgtttctggggcgggggtgattagttgggatgatagcaagtttctgagcaattgagatttgccacatccggtggggccataaatgattccgattacaggttgcaggtggtagtttagggaacggcaactgccgtcttctcgaagcaagggggccacctcgttcatcatttcccttacatgcatattttcccgcaccaaatccattaggaggcgctctcctcctagtgatagaagttcttgtagtgaggaaaagtttttcagcggttttagaccgtcagccatgggcattttggagagagtttgctgcaaaagttctagtctgttccacagttcagtgatgtgttctatggcatctcgatccagcagacctcctcgtttcgcgggtttggacggctcctggagtagggtatgagacgatgggcgtccagcgctgccagggttcggtccttccagggtctcagtgttcgagtcagggttgtttccgtcacagtgaaggggtgtgcgcctgcttgggcgcttgccagggtgcgcttcagactcattctgctggtggagaacttctgtcgcttggcgccctgtatgtcggccaagtagcagtttaccatgagttcgtagttgagcgcctcggctgcgtggcctttggcgcggagcttacctttggaagttttcttgcataccgggcagtataggcatttcagcgcatacagcttgggcgcaaggaaaatggattctggggagtatgcatctgcgccgcaggaggcgcaaacagtttcacattccaccagccaggttaaatccggttcattggggtcaaaaacaagttttccgccatattttttgatgcgtttcttacctttggtctccatgagttcgtgtcctcgttgagtgacaaacaggctgtccgtatccccgtagactgattttacaggcctcttctccagtggagtgcctcggtcttcttcgtacaggaactctgaccactctgatacaaaggcgcgcgtccaggccagcacaaaggaggctatgtgggaggggtagcgatcgttgtcaaccagggggtccaccttttccaaagtatgcaaacacatgtcaccctcttcaacatccaggaatgtgattggcttgtaggtgtatttcacgtgacctggggtccccgctgggggggtataaaagggggcggttctttgctcttcctcactgtcttccggatcgctgtccaggaacgtcagctgttggggtaggtattccctctcgaaggcgggcatgacctctgcactcaggttgtcagtttctaagaacgaggaggatttgatattgacagtgccggttgagatgcctttcatgaggttttcgtccatttggtcagaaaacacaatttttttattgtcaagtttggtggcaaatgatccatacagggcgttggataaaagtttggcaatggatcgcatggtttggttcttttccttgtccgcgcgctctttggcagcgatgttgagttggacatactcgcgtgctaggcacttccattcggggaagatagttgtcaattcatctggcacgattctcacttgccaccctcgattatgcaaggtaattaaatccacactggtggccacctcgcctcgaaggggttcgttggtccaacagagcctacctcctttcctagaacagaaagggggaagtgggtctagcataagttcatcgggagggtctgcatccatggtaaagattcccggaagtaaatccttatcaaaatagctgatgggagtggggtcatctaaggccatttgccattctcgagctgccagtgcacgctcatatgggttaaggggactgccccagggcatgggatgggtgagtgcagaggcatacatgccacagatgtcatagacgtagatgggatcctcaaagatgcctatataggttggatagcatcgcccccctctgatacttgctcgcacatagtcatatagttcatgtgatggcgctagcaaccccggacccaagttggtgcgattgggtttttctgttctgtagacaatctggcgaaagatggcgtgagaattggaagagatggtgggtctttgaaaaatgttgaaatgggcatgaggtagacctacagagtctctgacaaagtgggcataagattcttgaagcttggttaccagttcggcggtgacaagtacgtctagggcgcagtagtcaagtgtttcttgaatgatgtcataacctggttggtttttcttttcccacagttcgcggttgagaaggtattcttcgcgatccttccagtactcttctagcggaaacccgtctttgtctgcacggtaagatcctagcatgtagaactgattaactgccttgtaagggcagcagcccttctctacgggtagagagtatgcttgagcagcttttcgcagcgaagcgtgagtaagggcgaaggtgtctctgaccatgactttgagaaattggtatttgaagtccatgtcgtcacaggctccctgttcccagagttggaagtctacccgtttcttgtaggcggggttgggcaaagcgaaagtaacatcgttgaagagaatcttaccggctctgggcataaaattgcgagtgatgcggaaaggctgtggtacttccgctcgattgttgatcacctgggcagctaggacgatctcgtcgaaaccgttgatgttgtgtcctacgatgtataattctatgaaacgcggcgtgcctttgacgtgaggtagcttattgagctcatcaaaggttaggtctgtagggtcagataaggcgtagtgttcgagagcccattcgtgcaggtgaggatttgcatgtaggaatgatgaccaaagatccaccgccagtgctgtttgtaactggtcccgatactgacgaaaatgctggccaattgccattttttctggagtgacacagtagaaggttctggggtcttgttgccatcgatcccactttagtttaatggctagatcgtgggccatgttgacgagacgctcttctcctgagagtttcatgaccagcatgaaaggaactagttgtttgccaaaggaccccatccaggtgtaagtttccacatcgtaggtcaggaagagtctttctgtgcgaggatgagagccgatcgggaagaactggatttcctgccaccagttggaggattggctgttgatgtgatggaagtagaagtttctgcggcgcgccgagcattcgtgtttgtgcttgtacagacggccgcagtagtcgcagcgttgcacgggttgtatctcgtgaatgagctgtacctggcttcccttgacgagaaatttcagtgggaagccgaggcctggcgattgtatctcgtgctcttctatattcgctgtatcggcctgttcatcttctgtttcggtggtggtcatgctgacgagcccccgcgggaggcaagtccagacctcggcgcgggaggggcggagctgaaggaccagagcgcgcaggctggagctgtccagagtcctgagacgctgcggactcaggttagtaggtagggacagaagattaacttgcatgatcttttccagggcgtgcgggaggttcagatggtacttgatttccacaggttcgtttgtagagatgtcaatggcttgcagggttccgtgtcctttgggcgccactaccgtacctttgttttttcttttgatcggtggtggctctcttgcttcttgcatgctcagaagcgatgacggggacgcgcgccgggcggaagcggttgttccggacccggaggcatggctggtagtggcacgtcggcgccgcgcacgggcaggttctggtactgcgctctgagaagacttgcgtgcgccaccacgcgtcgattgacgtcttgtatctgacgtctctgggtgaaagctaccggccccgtgagcttgaacctgaaagagagttcaacagaatcaatttcggtatcgttaacggcagcttgtctcagtatttcttgtacgtcaccagagttgtcctggtaggcgatctccgccatgaactgctcgatttcttcctcctgaagatctccgcgacccgctctctcgacggtggccgcgaggtcattggagatacggcccatgagttgggagaatgcagtcatgcccgcctcgttccagacgcggctgtaaaccacggccccctcggagtctcttgcgcgcatcaccacctgagcgaggttaagctccacgtgtctggtgaagaccgcatagttgcataggcgctgaaaaaggtagttgagtgtggtggcaatgtgttcggcgacgaagaaatacatgatccatcgtctcagcggcatttcgctgacatcgcccagagcttccaagcgctccatggcctcgtagaagtccacggcaaaattaaaaaactgggagtttcgcgcggacacggtcaattcctcctcgagaagacggatgagttcggctatggtggcccgtacttcgcgttcgaaggctcccgggatctcttcttcctcttctatctcttcttccactaacatctcttcttcgtcttcaggcgggggcggagggggcacacggcgacgtcgacggcgcacgggcaaacggtcgatgaatcgttcaatgacctctccgcggcggcggcgcatggtttcagtgacggcgcggccgttctcgcgcggtcgcagagtaaaaacaccgccgcgcatctccttaaagtggtgactgggaggttctccgtttgggagggagagggcgctgattatacattttattaattggcccgtagggactgcgcgcagagatctgatcgtgtcaagatccacgggatctgaaaacctttcgacgaaagcgtctaaccagtcacagtcacaaggtaggctgagtacggcttcttgtgggcgggggtggttatgtgttcggtctgggtcttctgtttcttcttcatctcgggaaggtgagacgatgctgctggtgatgaaattaaagtaggcagttctaagacggcggatggtggcgaggagcaccaggtctttgggtccggcttgctggatacgcaggcgattggccattccccaagcattatcctgacatctagcaagatctttgtagtagtcttgcatgagccgttctacgggcacttcttcctcacccgttctgccatgcatacgtgtgagtccaaacccgcgcattggttgtaccagtgccaagtcagctacgactctttcggcgaggatggcttgctgtacttgggtgagggtggcttgaaagtcatcaaaatccacaaagcggtggtaagccccggtattaatggtgtaagcacagttggccatgactgaccagttaactgtctggtgaccagggcgcacgagctcggtgtatttaaggcgcgaataggcgcgggtgtcaaagatgtaatcgttgcaggtgcgcaccagatactggtaacctataagaaaatgcggcggtggttggcggtagagaggccatcgttctgtagctggagcgccgggggcgaggtcttccaacataaggcggtgatagccgtagatgtacctggacatccaggtgattcctgcggcggtagtagaagcccgaggaaactcgcgtacgcggttccaaatgttgcgtagcggcatgaagtagttcattgtaggcacggtttgaccagtgaggcgcgcgcagtcattgatgctctatagacacggagaaaatgaaagcgttcagcgactcgactccgtagcctggaggaacgtgaacgggttgggtcgcggtgtaccccggttcgagacttgtactcgagccggccggagccgcggctaacgtggtattggcactcccgtctcgacccagcctacaaaaatccaggatacggaatcgagtcgttttgctggttgccgaatggcagggaagtgagtcctattttttttttttgccgctcagatgcatcccgtgctgcgacagatgcgtccccaacaacagcccccctcgcagcagcagcaaccacaaaaggctgtccctgcaactactgcaactgccgctgtgagcggtgcgggacagcccgcctatgatctggacttggaagagggcgaaggactggcacgtctaggtgcgccttcgcccgagcggcatccgcgagttcaactgaaaaaagattctcgcgaggcgtatgtgccccaacagaacctatttagagacagaagcggcgaggagccggaggagatgcgagcttcccgctttaacgcgggtcgtgagctgcgtcacggtttggacagaagacgagtgttgcgggacgaggatttcgaagttgatgaagtgacagggatcagtcctgccagggcacacgtggctgcagccaaccttgtatcggcttacgaacagacagtaaaggaagagcgtaatttccaaaagtcttttaataatcatgtgcgaaccctcattgcccgcgaagaagtcacccttggtttgatgcatttgtgggatttgatggaagctatcattcagaaccctactagcaaacctctgaccgcacagctgtttctggtggtgcaacacagcagagacaatgaggctttcagagaggcgctgctcaacatcaccgaacccgaggggagatggttgtatgatcttatcaacattctacagagtatcatagtgcaggagcggagcctgggcctggccgagaaggtggctgccatcaattactcggttttgagcttgggaaagtattacgctcgcaagatctacaagactccatacgttcccatagacaaggaggtgaagatagatgggttctacatgcgcatgacgctgaaggtgttgaccctgagcgatgatcttggggtgtaccgcaatgacagaatgcatcgcgcggtgagcgccagcaggaggcgcgagttaagcgacagggaactgatgcacagtttgcaaagagctctaactggagctggaaccgagggtgagaattactttgatatgggagctgacttgcagtggcagcctagtcgcagggctctgaacgccgcgacggcaggatgtgagcttccttacatagaagaggcggatgaaggcgaggaggaagagggcgagtacttggaagactgatggcacaacccgtgttttttgctagatggaacagcaagcaccggatcccgcaatgcgggcggcgctgcagagccagccgtccggcattaactcctcggacgattggacccaggccatgcaacgtatcatggcgttgacgactcgcaaccccgaagcctttagacagcaaccccaggccaaccgtctatcggccatcatggaagctgtagtgccttcccgctctaatcccactcatgagaaggtcctggccatcgtgaacgcgttggtggagaacaaagctattcgtccagatgaggccggactggtatacaacgctctcttagaacgcgtggctcgctacaacagtagcaatgtgcaaaccaatttggaccgtatgataacagatgtacgcgaagccgtgtctcagcgcgaaaggttccagcgcgatgccaacctgggttcgctggtggcgttaaatgctttcttgagtactcagcctgctaatgtgccgcgtggtcaacaggattatactaactttttaagtgctttgagactgatggtatcagaagtacctcagagcgaagtatatcagtccggtcctgattacttctttcagactagcagacagggcttgcagacggtaaatctgagccaagcttttaaaaaccttaaaggtttgtggggagtgcatgccccggtaggagaaagagcaaccgtgtctagcttgttaactccgaactcccgcctattattactgttggtagctcctttcaccgacagcggtagcatcgaccgtaattcctatttgggttacctactaaacctgtatcgcgaagccatagggcaaagtcaggtggacgagcagacctatcaagaaattacccaagtcagtcgcgctttgggacaggaagacactggcagtttggaagccactctgaacttcttgcttaccaatcggtctcaaaagatccctcctcaatatgctcttactgcggaggaggagaggatccttagatatgtgcagcagagcgtgggattgtttctgatgcaagagggggcaactccgactgcagcactggacatgacagcgcgaaatatggagcccagcatgtatgccagtaaccgacctttcattaacaaactgctggactacttgcacagagctgccgctatgaactctgattatttcaccaatgccatcttaaacccgcactggctgcccccacctggtttctacacgggcgaatatgacatgcccgaccctaatgacggatttctgtgggacgacgtggacagcgatgttttttcacctctttctgatcatcgcacgtggaaaaaggaaggcggcgatagaatgcattcttctgcatcgctgtccggggtcattggtgctaccgcggctgagcccgagtctgcaagtccttttcctagtctacccttttctctacacagtgtacgtagcagcgaagtgggtagaataagtcgcccgagtttaatgggcgaagaggagtacctaaacgattccttgctcagaccggcaagagaaaaaaatttcccaaacaatggaatagaaagtttggtggataaaatgagtagatggaagacttatgctcaggatcacagagacgagcctgggatcatggggactacaagtagagcgagccgtagacgccagcgccatgacagacagaggggtcttgtgtgggacgatgaggattcggccgatgatagcagcgtattggacttgggtgggagaggaaggggcaacccgtttgctcatttgcgccctcgcttgggtggtatgttgtaaaaaaaaataaaaaagaaaaaactcaccaaggccatggcgacgagcgtacgttcgttcttctttattatctgtgtctagtataatgaggcgagtcgtgctaggcggagcggtggtgtatccggagggtcctcctccttcgtacgagagcgtgatgcagcagcagcaggcgacggcggtgatgcaatccccactggaggctccctttgtgcctccgcgatacctggcacctacggagggcagaaacagcattcgttactcggaactggcacctcagtacgataccaccaggttgtatctggtggacaacaagtcggcggacattgcttctctgaactatcagaatgaccacagcaacttcttgaccacggtggtgcaaaacaatgactttacccctacggaagccagcacccagaccattaactttgatgaacgatcgcggtggggcggtcagctaaaaaccatcatgcatactaacatgcccaacgtgaacgagtatatgtttagtaacaagttcaaagcgcgtgtgatggtgtccagaaaacctcctgagggtgttagagtagacgataattatgatcataagcaagatattctaaaatacgagtggttcgagtttactttgccagaaggcaacttttcggtcactatgactatcgacttgatgaacaatgccatcatagacaattacttgaaagtgggcagacagaatggagtgttggaaagtgacattggtgttaagttcgacactaggaacttcaagttgggatgggatccagaaactaagttgatcatgcctggggtttacacctatgaggccttccatcctgacatcgtattgctgcctggctgcggagtggactttaccgaaagccgtctgagcaaccttcttggcattagaaagaaacacccattccaagagggttttaagatcttgtatgaggatttagaaggaggaaatattccagcccttttggatgtagatgcttatgagaacagcaagaaagatcaaaaagccaaaatagaagctgctgcagaagctaaagcaaacatagttgccaacgatccggtaagggtggctaacgctagtgaaatcaggggagacagttttgccgcaacatccgttccgactaaagaatcattattggatgatgtgtctcaaaacatagagttaaaactcactattaagcctgtggaaaaagatggcaaaaacagaagttacaatgtgttggaagataaaatcaacacggcctatcgcagttggtacctttcgtacaattatggcgaccccgaaaaaggagtgcgttcctggacattgctcaccacctcagatgtcacctgcggagcggagcaggtctactggtcgcttccagacatgatgcaggatcctgtcactttccgctccactagacaagtcagtaactaccctgtggtgggtgcagagcttatgcccgtcttttcaaagagcttctacaacgaacaagctgtgtactcccagcagctccgccagtccacctcgcttacgcacgtcttcaaccgctttcctgagaaccagattttaatccgtccgccggcgcccacaattaccaccgtcagtgaaaacgttcctgctctcacagatcacgggaccctgccgttgcgcagcagtatccggggagtccaacgtgtgaccgttactgacgccagacgccgcacctgtccctacgtgtacaaggcactgggcatagtcgcaccgcgcgtcctttcaagccgcactttctaaaaaaaaaaaaaaaatgtccgttcttatctcgcccagtaataacaccggttggggtctgcgcgctcccagcaagatgtacggaggcgcacgcaaacgttctacccaacatcccgtgcgtgttcgcgggcattttcgcgctccatggggtgccctcaagggccgcactcgcgttcgaaccaccgtcgatgatgtaatcgatcaggtggttgccgacgcccgtaattatactcctactgcgcctacatctactgtggacgcagttattgacagtgtagtggctgacgctcgcaactatgctcgacgtaagagccggcgaaggcgcattgccagacgtcaccgagctaccactgccatgcgagcagcaagagctctgctacgaagagctagacgcgtggggcgaagagccatgcttagggcggccagacgtgcagcttcgggcgccagcgccggcaggtcccgcaggcaagcagccgctgtcgcagcggcgactattgccgacatggcccaatcgcgaagaggcaatgtatactgggtgcgtgacgctgccaccggtcaacgtgtacccgtgcgcacccgtccccctcgcacttagaagatactgagcagtctccgatgttgtgtcccagcggcgaggatgtccaagcgcaaatacaaggaagaaatgctgcaggttatcgcacctgaagtctacggccaaccgttgaaggatgaaaaaaaaccccgcaaaatcaagcgggtaaaaaaggacaaaaaagaagaggaagatggcgatgatgggctggcggagtttgtgcgcgagtttgccccacggcgacgcgtgcaatggcgtgggcgcaaagttcgacatgtgttgagacctggaacttcggtggtctttacacccggcgagcgttcaagcgctacttttaagcgttcctatgatgaggtgtacggggatgatgatattcttgagcaggcagctgaccgattaggcgagtttgcttatggcaagcgtagtagaataaatcccaaggatgaaacagtgtccatacccttggatcatggaaatcccacccctagtcttaaaccggtcactttgcagcaagtgttacccgtaactccgcgaacaggtgttaaacgcgaaggtgaagatttgtatcccactatgcaactgatggtgcccaaacgccagaagttggaggacgttttggagaaagtaaaagtggatccagatattcaacctgaggttaaagtgagacccattaagcaggtagcgcctggtctgggagtacaaactgtagacattaaaattcccactgaaagtatggaagtgcaaactgaacccgcaaagcctactgccacctccactgaagtgcaaacggacccatggatgcccatgcctattacaactgacgccgtcggtcccactcgaagatcccgacgaaagtacggtccagcaagtctgttgatgcccaactatgtcgtacacccatctattattcctactcctggttaccgaggcactcgctactatcgcagccgaaacagtacttcccgccgtcgccgcaagacacctgcaaatcgcagtcgtcgccgtagacgcacaagcaaaccgattcccggcgccctggtgcggcaagtgtaccgcaatggtagtgcggaacctttgacactgccgcgtgcgcgttaccatcctagtatcatcacttaatcaatgttgccgctgcctccttgcagatatggccctcacttgtcgccttcgcgttcccatcactggttaccgaggaagaaactcgcgccgtagaagagggatgttggggcgcggaatgcgacgctacaggcgacggcgtgctatccgcaagcaattgcggggtggttttttgccagccttaattccaattatcgctgctgcgattggcgcaataccaggcatagcttccgtggcggttcaggcctcgcaacgacattgacattggaaaaaaaaaaaacgtataaataaaaaatacaatggactctgacactcctggtactgtgactatgttttcttagagatggaagacatcaatttttcatccttggctccgcgacacggcacgaagccgtacatgggcacctggagcgacatcggcacgagccaactgaacgggggcgccttcaattggagcagtatctggagcgggcttaaaaattttggctcaaccataaaaacatacgggaacaaagcttggaacagcagtacaggacaggcgcttagaaataaacttaaagaccagaacttccaacaaaaagtagtcgatgggatagcttccggtatcaatggagtggtagatttggctaaccaggctgtgcagaaaaagataaacagtcgtttggacccgccgccagcaaccccaggtgaaatgcaagtggaggaagaaattcctccgccagaaaaacgaggcgacaagcgtccgcgtcccgatttggaagagacgctggtgacgcgcgtagatgaaccgccttcttatgaggaagcaacgaagcttggaatgcccaccactagaccgatagcccctatggccaccggggtgatgaaaccttctcagttgcatcgacccgtcaccttggatttgccccctcctcctgctgctactgctgtacccgcttctaagcctgtcgctgccccgaaaccagtcgccgtagccaggtcacgtcccgggggcgctcctcgtccaaatgcacactggcaaaatactctgaacagcatcgtgggtctaggcgtgcaaagtgtaaaacgccgtcgctgcttttaattaaatatggagtagcgcttaacttgcctatctgtgtatatgtgtcattacacgccgtcacagcatcagaggaaaaaaggaagaggtcgtgcgtcgacgctgagttactttcaagatggccaccccatcgatgctgccccaatgggcatacatgcacatcgccggacaggatgcttcggagtacctgagtccgggtctggtgcagttcgcccgcgccacagacacctacttcaatctgggaaataagtttagaaatcctaccgtagcgccgacccacgatgtgaccaccgatcgtagccagcggctcatgttgcgcttcgtgcccgttgaccgggaggacaatacatactcttacaaagtgcggtacaccctggccgtgggcgacaacagagtgctggatatggccagcacgttctttgacattaggggcgtgttggacagaggtcccagttttaaaccctattctggtacggcttacaactccctggctcctaaaggcgctccaaatgcatctcagtggttggataagggagttacaagcactggcctagtggacgacggcaatactgatgatggggaagaagccaaaaaagcaacatacacttttggtaatgctccagtaaaagccgaggctgaaatcacaaaagacggattgccggtgggcttggaagtttcaactgaaggtcctaaaccaatctatgctgataagctttatcagccagaacctcaagtgggagacgaaacttggactgacctagacggaaaaaccgaagagtatggagggagggttcttaaacctgaaactaaaatgaaaccctgctacggatcttttgctaaacctactaatattaaaggaggtcaggcaaaggtaaaaccaaaagaagacgatggcactaacaacatcgagtatgacattgacatgaacttctttgacttaagatcacaaagatcagaactcaaacctaaaattgtaatgtatgcagaaaatgtggacctggaatgtccagatactcatgttgtgtacaaacctggagtttcagatgctagttctgagaccaatcttggacaacagtctatgcccaacagacccaactacattggcttcagagataacttcatcggacttatgtactataacagtactggcaacatgggggtactggctggccaagcgtctcagttgaatgcagtggttgacttgcaggacagaaacacagaactgtcttaccaactcttgcttgactctctgggcgacagaaccagatactttagcatgtggaatcaggctgtggacagttatgatcctgatgtacgtgttattgaaaatcatggtgtggaagatgaacttcccaactattgttttccgttggatggtgtcggtccgcgaacagatagttacaaggagattaagccaaatggagaccaatctacttggacaaatgtagacccaactggcagcagtgaacttgctaagggaaatccatttgccatggaaattaaccttcaagccaatctatggcgaagtttcctttattccaatgtggctctatatctcccagactcgtacaaatacaccccgtccaatgtcactcttccagaaaacaaaaacacctacgactacatgaacgggcgggtggtgccgccatctctagtagacacctatgtgaacattggtgccaggtggtctctggatgccatggacaatgtcaacccattcaaccaccaccgtaacgctggcttgcgttaccgatccatgcttctgggtaacggacgttatgtgcctttccacatacaagtgcctcaaaaattcttcgctgttaaaaacctgctgcttctcccaggctcctacacttatgagtggaactttaggaaggatgtaaacatggttctacagagttccctcggtaacgacctacgggtagatggcgccagcatcagttttacgagcatcaacctctatgctacttttttccccatggctcacaacaccgcttccacccttgaagccatgctgcggaatgacaccaatgatcagtcattcaacgactacctatctgcagctaacatgctctaccccattcctgccaatgcaaccaatattcccatttccattccttctcgcaactgggcggctttcagaggctggtcatttaccagactgaaaaccaaagaaactccctctttggggtctggatttgacccctacttcgtctattctggttctattccctacctggatggtaccttctacctgaaccacacttttaagaaggtttccatcatgtttgactcttcagtgagctggcctggaaatgacaggttactatctcctaacgaatttgaaataaagcgcactgtggatggcgaaggctacaacgtagcccaatgcaacatgaccaaagactggttcttggtacagatgctcgccaactacaacatcggctatcagggcttctacattccagaaggatacaaagatcgcatgtattcatttttcagaaacttccagcccatgagcaggcaggtggttgatgaggtcaattacaaagacttcaaggccgtcgccataccctaccaacacaacaactctggctttgtgggttacatggctccgaccatgcgtcaaggtcaaccctatcccgctaactatccctatccactcattggaacaactgccgtaaatagtgttacgcagaaaaagttcttgtgtgacagaaccatgtggcgcataccgttctcaagcaacttcatgtctatgggagcccttacagacttgggacagaacatgctctatgccaactcagctcatgctctggacatgacctttgaggtggatcccatggatgagcccaccctgctttatcttctcttcgaagttttcgacgtggtcagagtgcatcagccacaccgcggcatcatcgaggcagtctacctgcgtacaccgttctcggccggtaacgctaccacgtaagaagcttcttgcttcttgcaaacagcagctgcaaccatggcctgcggatcccaaaacggctccagcgagcaagagctcagagccattgtccaagacctgggttgcggaccatattttttgggaacctttgataagcgcttcccggggttcatggcccccgataagctcgcctgtgccattgtaaatacggccggacgtgagacggggggagagcactggttggctttcggttggaacccacgttctaacacctgctacctttttgatccttttggattctcggatgatcgtctcaaacagatttaccagtttgaatatgagggtctcctgcgccgcagcgctcttgctaccaaggaccggtgtattacgctggaaaaatctacccagaccgtgcagggcccccgttctgccgcctgcggacttttctgctgcatgttccttcatgcctttgtgcactggcctgaccgtcccatggacggaaaccccaccatgaaattgctaactggagtgccaaacaacatgcttcattctcctaaagtccagcccaccctgtgtgacaatcaaaaagcactctaccattttctcaatacccattcgccttattttcgctctcatcgtacacacatcgaaagggccactgcgttcgaccgtatggatgtgcaataatgattcatgtaaacaacgtgttcaataaacagcactttattttttacatgtatcgaggctctggattacttatttatttacaagtcgaatgggttctgacgagaatcagaatgacccgcaggcagtgatacgttgcggaactgatacttgggttgccacttgaattcgggaatcaccaacttgggaaccggtatatcgggcaggatgtcactccacagctttctggtcagctgcaaagctcccagcaggtcaggagccgaaatcttgaaatcacaattaggaccagtgctctgagcgcgagagttgcggtacaccggattgcagcactgaaacaccatcagcgacggatgtcttacgcttgccagcacggtgggatctgcaatcatgcccacatccagatcttcagcattggcaatgctgaacggggtcatcttgcaggtctgcctacccatggcgggcacccaattaggcttgtggttacaatcgcagtgcagggggatcagtatcatcttggcctgatcctgtctgattcctggatacacggctctcatgaaagcatcatattgcttgaaagcctgctgggctttactaccctcggtataaaacatcccgcaggacctgctcgaaaactggttagctgcgcagccggcatcattcacacagcagcgggcgtcattgttggctatttgcaccacacttctgccccagcggttttgggtgattttggttcgctcgggattctccttcaaggctcgttgtccgttctcgctggccacatccatctcgataatctgctccttctgaatcataatattgccatgcaagcacttcagcttgccctcataatcattgcagccatgaggccacaacgcacagcctgtacattcccaattatggtgggcgatctgagaaaaagaatgtatcattccctgcagaaatcttcccatcatcgtgctcagtgtcttgtgactagtgaaagttaactggatgcctcggtgctcctcgttcacgtactggtgacagatgcgcttgtattgttcgtgctgctcaggcattagtttaaaagaggttctaagttcgttatccagcctgtacttctccatcagcagacacatcacttccatgcctttctcccaagcagacaccaggggcaagctaatcggattcttaacagtgcaggcagcagctcctttagccagagggtcatctttggcgatcttctcaatgcttcttttgccatccttctcaacgatgcgcacgggcgggtagctgaaacccactgctacaagttgcgcctcttctctttcttcttcgctgtcttgactgatgtcttgcatggggacatgtttggtcttccttggcttctttttcgggggtatcggaggaggaggactgtcgctccgttccggagacagggaggattgtgacgtttcgctcaccattaccaactgactgtcggtagaagaacctgaccccacacggcgacaggtgtttctcttcgggggcagaggtggaggcgattgcgaagggctgcggtccgacctggaaggcggatgactggcagaaccccttccgcgttcgggggtgtgctccctgtggcggtcgcttaactgatttccttcgcggctggccattgtgttctcctaggcagagaaacaacagacatggaaactcagccattgctgtcaacatcgccacgagtgccatcacatctcgtcctcagcgacgaggaaaaggagcagagcttaagcattccaccgcccagtcctgccaccacctctaccctagaagataaggaggtcgacgcatctcatgacatgcagaataaaaaagcgaaagagtctgagccagacatcgaacaagacccgggctatgtgacaccggtggaacacgaggaagagttgaaacgctttctagagagagaggatgaaaactgcccaaaacagcaagcggataactatcaccaagatgctggaaatagggatcagaacaccgactacctcatagggcttgacggggaagacgcgctccttaaacatctagcaagacagtcactcatagtcaaggatgcattattggacagaactgaagtgcccatcagtgtcgaagagctcagccgcgcctacgagcttaacctattttcacctcgtactccccccaaacgtcagccaaacggcacctgcgagccaaatcctcgcttaaacttttatccagcttttgctgtgccagaagtactggctacctatcacatcttttttaaaaatcaaaaaattccagtctcctgccgcgctaatcgcacccgcgccgatgccctactcaatctgggacctggttcacgcttacctgatatagcttccttggaagaggttccaaagatcttcgagggtctgggcaataatgagactcgggccgcaaatgctctgcaaaagggagaaaatggcatggatgagcatcacagcgttctggtggaattggaaggcgataatgccagactcgcagtactcaagcgaagcgtcgaggtcacacactttgcataccccgctgtcaacctgccccctaaagtcatgacggccgtcatggaccagttactcattaagcgcgcaagtcccctttcagaagacatgcatgacccagatgcctgtgatgagggtaaaccagtggtcagtgatgagcagctaacccgatggctgggcaccgactctccccgggatttggaagagcgtcgcaagcttatgatggccgtggtgctggttaccgtagaactagagtgtcttcggcgtttctttaccgattcagaaaccttgcgcaaactcgaagagaatctgcactacacttttagacacggctttgtgcggcaggcatgcaagatatctaacgtggaactcaccaacctggtttcctacatgggtattctgcatgagaatcgcctaggacaaagcgtgctgcacagcacccttaagggggaagcccgccgtgattacatccgcgattgtgtttatctctacctgtgccacacgtggcaaaccggcatgggtgtatggcagcaatgtttagaagaacagaacctgaaagagctaaacaagctcttacagaaatctcttaaggttctgtggacagggttcgacgagcgcaccgtcgcttccgacctggcagacctcatcttcccagagcgtctcagggttactttgcgaaacggactgcctgactttatgagccagagcatgcttaacaattttcgctctttcatcctggaacgctccggtatcctgcccgccacctgctgcgcactgccctccgactttgtgcctctcacctaccgcgaatgccccccgccgctatggagtcactgctacctgttccgtctggccaactacctctcctaccactcggatgtgatcgaggatgtgagcggagacggcttgctggagtgtcactgccgctgcaatctgtgcacgccccaccggtccctagcttgcaacccccagttgatgagcgaaacccagataataggcacctttgaattgcaaggccccagcagccaaggcgatgggtcttctcctgggcaaagtttaaaactgaccccgggactgtggacctccgcctacttgcgcaagtttgccccggaagattaccacccctatgaaatcaagttctatgaggaccaatcacagcctccgaaagccgaactttcggcctgcgtcatcacccagggggcaattctggcccaattgcaagccatccaaaaatcccgccaagaatttctactgaaaaagggtaagggggtctaccttgacccccagaccggcgaggaactcaacacaaggttccctcaggatgtcccaacgacgagaaagcaagaagttgaaggtgcagccgccgcccccagaagatatggaggaagattgggacagtcaggcagaggaagcggaggaggaggacagtctggaggacagtctggaggaagacagtttggaggaggaaaacgaggaggcagaggaggtggaagaagtaaccgccgacaaacagttatcctcggctgcggagacaagcaacagcgctaccatctccgctccgagtcgaggaacccggcggcgtcccagcagtagatgggacgagaccggacgcttcccgaacccaaccagcgcttccaagaccggtaagaaggatcggcagggatacaagtcctggcgggggcataagaatgccatcatctcctgcttgcatgagtgcgggggcaacatatccttcacgcggcgctacttgctattccaccatggggtgaactttccgcgcaatgttttgcattactaccgtcacctccacagcccctactatagccagcaaatcccggcagtctcgacagataaagacagcggcggcgacctccaacagaaaaccagcagcggcagttagaaaatacacaacaagtgcagcaacaggaggattaaagattacagccaacgagccagcgcaaacccgagagttaagaaatcggatctttccaaccctgtatgccatcttccagcagagtcggggccaagagcaggaactgaaaataaaaaaccgatctctgcgttcgctcaccagaagttgtttgtatcacaagagcgaagatcaacttcagcgcactctcgaggacgccgaggctctcttcaacaagtactgcgcgctgactcttaaagagtaggcagcgaccgcgcttattcaaaaaaggcgggaattacatcatcctcgacatgagtaaagaaattcccacgccttacatgtggagttatcagccccaaatgggattggcggcaggcgcctcccaggactactccacccgcatgaattggctcagcgccgggccttctatgatttctcgagttaatgatatacgcgcctaccgaaaccaaatacttttggaacagtcagctcttaccaccacgccccgccaacaccttaatcccagaaattggcccgccgccctagtgtaccaggaaagtcccgctcccaccactgtattacttcctcgagacgcccaggccgaagtccaaatgactaatgcaggtgcgcagttagcgggcggctccaccctatgtcgtcacaggcctcggcataatataaaacgcctgatgatcagaggccgaggtatccagctcaacgacgagtcggtgagctctccgcttggtctacgaccagacggaatctttcagattgccggctgcgggagatcttccttcacccctcgtcaggctgttctgactttggaaagttcgtcttcgcaaccccgctcgggcggaatcgggaccgttcaatttgtggaggagtttactccctctgtctacttcaaccccttctccggatctcctgggcactacccggacgagttcataccgaacttcgacgcgattagcgagtcagtggacggctacgattgatgtctggtgacgcggctgagctatctcggctgcgacatctagaccactgccgccgctttcgctgctttgcccgggaactcattgagttcatctacttcgaactccccaaggatcaccctcaaggtccggcccacggagtgcggattactatcgaaggcaaaatacactctcgcctgcaacgaattttctcccagcggcccgtgctgatcgagcgagaccagggaaacaccacggtttccatctactgcatttgtaatcaccccggattgcatgaaagcctttgctgtcttatgtgtactgagtttaataaaaactgaattaagactctcctacggactgccgcttcttcaacccggattttacaaccagaagaacgaaacttttcctgtcgtccaggactctgttaacttcacctttcctactcacaaactagaagctcaacgactacaccgcttttccagaagcattttccctactaatactactttcaaaaccggaggtgagctccaaggtcttcctacagaaaacccttgggtggaagcgggccttgtagtgctaggaattcttgcgggtgggcttgtgattattctttgctacctatacacaccttgcttcactttcctagtggtgttgtggtattggtttaaaaaatggggcccatactagtcttgcttgttttactttcgcttttggaaccgggttctgccaattacgatccatgtctagacttcgacccagaaaactgcacacttacttttgcacccgacacaagccgcatctgtggagttcttattaagtgcggatgggaatgcaggtccgttgaaattacacacaataacaaaacctggaacaataccttatccaccacatgggagccaggagttcccgagtggtacactgtctctgtccgaggtcctgacggttccatccgcattagtaacaacactttcattttttctgaaatgtgcgatctggccatgttcatgagcaaacagtattctctatggcctcctagcaaggacaacatcgtaacgttctccattgcttattgcttgtgcgcttgccttcttactgctttactgtgcgtatgcatacacctgcttgtaaccactcgcatcaaaaacgccaataacaaagaaaaaatgccttaacctctttctgtttacagacatggcttctcttacatctctcatatttgtcagcattgtcactgccgctcacggacaaacagtcgtctctatccctctaggacataattacactctcataggacccccaatcacttcagaggtcatctggaccaaactgggaagcgttgattactttgatataatctgcaacaaaacaaaaccaataatagtaacttgcaacatacaaaatcttacattgattaatgttagcaaagtttacagcggttactattatggttatgacagatacagtagtcaatatagaaattacttggttcgtgttacccagttaaaaaccacgaaaatgccaaatatggcaaagattcgatccgatgacaattctctagaaacttttacatctcccaccacacccgacgaaaaaaacatcccagattcaatgattgcaattgttgcagcggtggcagtggtgatggcactaataataatatgcatgcttttatatgcttgtcgctacaaaaagtttcatcctaaaaaacaagatctcctactaaggcttaacatttaatttctttttatacagccatggtttccactaccacattccttatgcttactagtcttgcaactctgacttctgctcgctcacacctcactgtaactataggctcaaactgcacactaaaaggacctcaaggtggtcatgtcttttggtggagaatatatgacaatggatggtttacaaaaccatgtgaccaacctggtagatttttctgcaacggcagagacctaaccattatcaacgtgacagcaaatgacaaaggcttctattatggaaccgactataaaagtagtttagattataacattattgtactgccatctaccactccagcaccccgcacaactactttctctagcagcagtgtcgctaacaatacaatttccaatccaacctttgccgcgcttttaaaacgcactgtgaataattctacaacttcacatacaacaatttccacttcaacaatcagcattatcgctgcagtgacaattggaatatctattcttgtttttaccataacctactacgcctgctgctatagaaaagacaaacataaaggtgatccattacttagatttgatatttaatttgttctttttttttttatttacagtatggtgaacaccaatcatggtacctagaaatttcttcttcaccatactcatttgtgcatttaatgtttgcgctactttcacagcagtagccacagcaaccccagactgtataggagcatttgcttcctatgcactttttgcttttgttacttgcatctgcgtatgtagcatagtctgcctggttattaattttttccaacttctagactggatccttgtgcgaattgcctacctgcgccaccatcccgaataccgcaaccaaaatatcgcggcacttcttagactcatctaaaaccatgcaggctatactaccaatatttttgcttctattgcttccctacgctgtctcaaccccagctgcctatagtactccaccagaacaccttagaaaatgcaaattccaacaaccgtggtcatttcttgcttgctatcgagaaaaatcagaaattcccccaaatttaataatgattgctggaataattaatataatctgttgcaccataatttcatttttgatataccccctatttgattttggctggaatgctcccaatgcacatgatcatccacaagacccagaggaacacattcccctacaaaacatgcaacatccaatagcgctaatagattacgaaagtgaaccacaacccccactactccctgctattagttacttcaacctaaccggcggagatgactgaaacactcaccacctccaattccgccgaggatctgctcgatatggacggccgcgtctcagaacagcgacttgcccaactacgcatccgccagcagcaggaacgcgcggccaaagagctcagagatgtcatccaaattcaccaatgcaaaaaaggcatattctgtttggtaaaacaagccaagatatcctacgagatcaccgctactgaccatcgcctctcttacgaacttggcccccaacgacaaaaatttacctgcatggtgggaatcaaccccatagttatcacccagcaaagtggagatactaagggttgcattcactgctcctgcgattccatcgagtgcacctacaccctgctgaagaccctatgcggcctaagagacctgctaccaatgaattaaaaaatgattaataaaaaatcacttacttgaaatcagcaataaggtctctgttgaaattttctcccagcagcacctcacttccctcttcccaactctggtattctaaaccccgttcagcggcatactttctccatactttaaaggggatgtcaaattttagctcctctcctgtacccacaatcttcatgtctttcttcccagatgaccaagagagtccggctcagtgactccttcaaccctgtctacccctatgaagatgaaagcacctcccaacacccctttataaacccagggtttatttccccaaatggcttcacacaaagcccagacggagttcttactttaaaatgtttaaccccactaacaaccacaggcggatctctacagctaaaagtgggagggggacttacagtggatgacactgatggtaccttacaagaaaacatacgtgctacagcacccattactaaaaataatcactctgtagaactatccattggaaatggattagaaactcaaaacaataaactatgtgccaaattgggaaatgggttaaaatttaacaacggtgacatttgtataaaggatagtattaacaccttatggactggaataaaccctccacctaactgtcaaattgtggaaaacactaatacaaatgatggcaaacttactttagtattagtaaaaaacggagggcttgttaatggctacgtgtctctagttggtgtatcagacactgtgaaccaaatgttcacacaaaagacagcaaacatccaattaagattatattttgactcttctggaaatctattaactgatgaatcagacttaaaaattccacttaaaaataaatcttctacagcgaccagtgaaactgtagccagcagcaaagcctttatgccaagtactacagcttatcccttcaacaccactactagggatagtgaaaactacattcatggaatatgttactacatgactagttatgatagaagtctatttcccttgaacatttctataatgctaaacagccgtatgatttcttccaatgttgcctatgccatacaatttgaatggaatctaaatgcaagtgaatctccagaaagcaacatagctacgctgaccacatccccctttttcttttcttacattacagaagacgacaactaaaataaagtttaagtgtttttatttaaaatcacaaaattcgagtagttattttgcctccaccttcccatttgacagaatacaccaatctctccccacgcacagctttaaacatttggataccattagagatagacattgttttagattccacattccaaacagtttcagagcgagccaatctggggtcagtgatagataaaaatccatcgcgatagtcttttaaagcgctttcacagtccaactgctgcggatgcgaatccggagtctggatcacggtcatctggaagaagaacgatgggaatcataatccgaaaacggtatcggacgattgtgtctcatcaaacccacaagcagccgctgtctgcgtcgctccgtgcaactgctgtttatgggatcagggtccacagtgtcctgaagcatgattttaatagcccttaacatcaactttctggtgcgatgcgcgcagcaacgcattctgatttcactcaaatctttgcagtaggtacaacacattattacaatattgtttaataaaccataattaaaagcgctccagccaaaactcatatctgatataatcgcccctgcatgaccatcataccaaagtttaatataaattaaatgacgttccctcaaaaacacactacccacatacatgatctcttttggcatgtgcatattaacaatctgtctgtaccatggacaacgttggttaatcatgcaacccaatataaccttccggaaccacactgccaacaccgctcccccagccatgcattgaagtgaaccctgctgattacaatgacaatgaagaacccaattctctcgaccgtgaatcacttgagaatgaaaaatatctatagtggcacaacatagacataaatgcatgcatcttctcataatttttaactcctcaggatttagaaacatatcccagggaataggaagctcttgcagaacagtaaagctggcagaacaaggaagaccacgaacacaacttacactatgcatagtcatagtatcacaatctggcaacagcgggtggtcttcagtcatagaagctcgggtttcattttcctcacaacgtggtaactgggctctggtgtaagggtgatgtctggcgcatgatgtcgagcgtgcgcgcaaccttgtcataatggagttgcttcctgacattctcgtattttgtatagcaaaacgcggccctggcagaacacactcttcttcgccttctatcctgccgcttagcgtgttccgtgtgatagttcaagtacagccacactcttaagttggtcaaaagaatgctggcttcagttgtaatcaaaactccatcgcatctaattgttctgaggaaatcatccacggtagcatatgcaaatcccaaccaagcaatgcaactggattgcgtttcaagcaggagaggagagggaagagacggaagaaccatgttaatttttattccaaacgatctcgcagtacttcaaattgtagatcgcgcagatggcatctctcgcccccactgtgttggtgaaaaagcacagctaaatcaaaagaaatgcgattttcaaggtgctcaacggtggcttccaacaaagcctccacgcgcacatccaagaacaaaagaataccaaaagaaggagcattttctaactcctcaatcatcatattacattcctgcaccattcccagataattttcagctttccagccttgaattattcgtgtcagttcttgtggtaaatccaatccacacattacaaacaggtcccggagggcgccctccaccaccattcttaaacacaccctcataatgacaaaatatcttgctcctgtgtcacctgtagcgaattgagaatggcaacatcaattgacatgcccttggctctaagttcttctttaagttctagttgtaaaaactctctcatattatcaccaaactgcttagccagaagccccccgggaacaagagcaggggacgctacagtgcagtacaagcgcagacctccccaattggctccagcaaaaacaagattggaataagcatattgggaaccgccagtaatatcatcgaagttgctggaaatataatcaggcagagtttcttgtaaaaattgaataaaagaaaaatttgccaaaaaaacattcaaaacctctgggatgcaaatgcaataggttaccgcgctgcgctccaacattgttagttttgaattagtctgcaaaaataaaaaaaaaaacaagcgtcatatcatagtagcctgacgaacaggtggataaatcagtctttccatcacaagacaagccacagggtctccagctcgaccctcgtaaaacctgtcatggtgattaaacaacagcaccgaaagttcctcgcggtgaccagcatgaataattcttgatgaagcatacaatccagacatgttagcatcagttaacgagaaaaaacagccaacatagcctttgggtataattatgcttaatcgtaagtatagcaaagccacccctcgcggatacaaagtaaaaggcacaggagaataaaaaatataattatttctctgctgctgttcaggcaacgtcgcccccggtccctctaaatacacatacaaagcctcatcagccatggcttaccagacaaagtacagcgggcacgcacaagctctaaagtcactctccaacctctccacaatatatatacacaagccctaaactgacgtaatgggagtaaagtgtaaaaaatcccgccaaacccaacacacaccccgaaactgcgtcaccagggaaaagtacagtttcacttccgcaatcccaacaagcgtcacttcctctttctcacggtacgtcacatcccattaacttgcaacgtcattttcccacggccgcgccgccccgtttagccgttaaccccacagccaatcaccacacaccccacaatttttaaaatcacctcatttacatattggcaccattccatctataaggtatattattgatgatggccaagctatttaggtgacactatagaatactcaagctatgcatcaagcttggtaccgagctcggatccactagtaacggccgccagtgtgctggaattcgcccttgtttaaacgcgatcg

SEQ ID NO: 13 - DNA, 35016 bp, Adenovirus B35
  MISC_FEATURE (1)..(35016): Complete Genome
cgatcgcgtttaaacaagggcgaattccagcacactggcggccgctcgagcatgcatctagagggcccaattcgccctatagtgagtcgtattacaatgcactggcccatcatcaataatataccttatagatggaatggtgccaatatgtaaatgaggtgattttaaaaagtgtgggccgtgtggtgattggctgtggggttaacggttaaaaggggcggcgcggccgtgggaaaatgacgttttatgggggtggagtttttttgcaagttgtcgcgggaaatgttacgcataaaaaggcttcttttctcacggaactacttagttttcccacggtatttaacaggaaatgaggtagttttgaccggatgcaagtgaaaattgctgattttcgcgcgaaaactgaatgaggaagtgtttttctgaataatgtggtatttatggcagggtggagtatttgttcagggccaggtagactttgacccattacgtggaggtttcgattaccgtgttttttacctgaatttccgcgtaccgtgtcaaagtcttctgtttttacgtaggtgtcagctgatcgctagggtatttatacctcagggtttgtgtcaagaggccactcttgagtgccagcgagaagagttttctcctctgcgccggcagtttaataataaaaaaatgagagatttgcgatttctgcctcaggaaataatctctgctgagactggaaatgaaatattggagcttgtggtgcacgccctgatgggagacgatccggagccacctgtgcagctttttgagcctcctacgcttcaggaactgtatgatttagaggtagagggatcggaggattctaatgaggaagctgtgaatggcttttttaccgattctatgcttttagctgctaatgaaggattagaattagatccgcctttggacactttcaatactccaggggtgattgtggaaagcggtacaggtgtaagaaaattacctgatttgagttccgtggactgtgatttgcactgctatgaagacgggtttcctccgagtgatgaggaggaccatgaaaaggagcagtccatgcagactgcagcgggtgagggagtgaaggctgccaatgttggttttcagttggattgcccggagcttcctggacatggctgtaagtcttgtgaatttcacaggaaaaatactggagtaaaggaactgttatgttcgctttgttatatgagaacgcactgccactttatttacagtaagtgtgtttaagttaaaatttaaaggaatatgctgtttttcacatgtatattgagtgtgagttttgtgcttcttattataggtcctgtgtctgatgctgatgaatcaccatctcctgattctactacctcacctcctgatattcaagcacctgttcctgtggacgtgcgcaagcccattcctgtgaagcttaagcctgggaaacgtccagcagtggagaaacttgaggacttgttacagggtggggacggacctttggacttgagtacacggaaacgtccaagacaataagtgttccatatccgtgtttacttaaggtgacgtcaatatttgtgtgagagtgcaatgtaataaaaatatgttaactgttcactggtttttattgctttttgggcggggactcaggtatataagtagaagcagacctgtgtggttagctcataggagctggctttcatccatggaggtttgggccattttggaagaccttaggaagactaggcaactgttagagagcgcttcggacggagtctccggtttttggagattctggttcgctagtgaattagctagggtagtttttaggataaaacaggactataaacaagaatttgaaaagttgttggtagattgcccaggactttttgaagctcttaatttgggccatcaggttcactttaaagaaaaagttttatcagttttagacttttcaaccccaggtagaactgctgctgctgtggcttttcttacttttatattagataaatggatcccgcagactcatttcagcaggggatacgttttggatttcatagccacagcattgtggagaacatggaaggttcgcaagatgaggacaatcttaggttactggccagtgcagcctttgggtgtagcgggaatcctgaggcatccaccggtcatgccagcggttctggaggaggaacagcaagaggacaacccgagagccggcctggaccctccagtggaggaggcggagtagctgacttgtctcctgaactgcaacgggtgcttactggatctacgtccactggacgggataggggcgttaagagggagagggcatccagtggtactgatgctagatctgagttggctttaagtttaatgagtcgcagacgtcctgaaaccatttggtggcatgaggttcagaaagagggaagggatgaagtttctgtattgcaggagaaatattcactggaacaggtgaaaacatgttggttggagccagaggatgattgggaggtggccattaaaaattatgccaagatagctttgaggcctgataaacagtataagatcagtagacggattaatatccggaatgcttgttacatatctggaaatggggctgaggtggtaatagatactcaagacaagacagttattagatgctgcatgatggatatgtggcctggagtagtcggtatggaagcagtcacttttgtaaatgttaagtttaggggagatggttataatggaatagtgtttatggccaataccaaacttatattgcatggttgtagcttttttggtttcaacaatacctgtgtagatgcctggggacaggttagtgtacgggggtgtagtttctatgcgtgttggattgccacagctggcagaaccaagagtcaattgtctctgaagaaatgcatattccaaagatgtaacctgggcattctgaatgaaggcgaagcaagggtccgtcactgcgcttctacagatactggatgttttattttaattaagggaaatgccagcgtaaagcataacatgatttgtggtgcttccgatgagaggccttatcaaatgctcacttgtgctggtgggcattgtaatatgctggctactgtgcatattgtttcccatcaacgcaaaaaatggcctgtttttgatcacaatgtgttgaccaagtgcaccatgcatgcaggtgggcgtagaggaatgtttatgccttaccagtgtaacatgaatcatgtgaaagtgttgttggaaccagatgccttttccagaatgagcctaacaggaatctttgacatgaacacgcaaatctggaagatcctgaggtatgatgatacgagatcgagggtgcgcgcatgcgaatgcggaggcaagcatgccaggttccagccggtgtgtgtagatgtgaccgaagatctcagaccggatcatttggttattgcccgcactggagcagagttcggatccagtggagaagaaactgactaaggtgagtattgggaaaactttggggtgggattttcagatggacagattgagtaaaaatttgttttttctgtcttgcagctgacatgagtggaaatgcttcttttaaggggggagtcttcagcccttatctgacagggcgtctcccatcctgggcaggagttcgtcagaatgttatgggatctactgtggatggaagacccgttcaacccgccaattcttcaacgctgacctatgctactttaagttcttcacctttggacgcagctgcagccgctgccgccgcctctgtcgccgctaacactgtgcttggaatgggttactatggaagcatcgtggctaattccacttcctctaataacccttctacactgactcaggacaagttacttgtccttttggcccagctggaggctttgacccaacgtctgggtgaactttctcagcaggtggccgagttgcgagtacaaactgagtctgctgtcggcacggcaaagtctaaataaaaaaaattccagaatcaatgaataaataaacgagcttgttgttgatttaaaatcaagtgtttttatttcatttttcgcgcacggtatgccctggaccaccgatctcgatcattgagaactcggtggattttttccagaatcctatagaggtgggattgaatgtttagatacatgggcattaggccgtctttggggtggagatagctccattgaagggattcatgctccggggtagtgttgtaaatcacccagtcataacaaggtcgcagtgcatggtgttgcacaatatcttttagaagtaggctgattgccacagataagcccttggtgtaggtgtttacaaaccggttgagctgggaggggtgcattcgaggtgaaattatgtgcattttggattggatttttaagttggcaatattgccgccaagatcccgtcttgggttcatgttatgaaggactaccaagacggtgtatccggtacatttaggaaatttatcgtgcagcttggatggaaaagcgtggaaaaatttggagacacccttgtgtcctccgagattttccatgcactcatccatgataatagcaatggggccgtgggcagcggcgcgggcaaacacgttccgtgggtctgacacatcatagttatgttcctgagttaaatcatcataagccattttaatgaatttggggcggagcgtaccagattggggtatgaatgttccttcgggccccggagcatagttcccctcacagatttgcatttcccaagctttcagttctgagggtggaatcatgtccacctggggggctatgaagaacaccgtttcgggggcgggggtgattagttgggatgatagcaagtttctgagcaattgagatttgccacatccggtggggccataaataattccgattacaggttgcaggtggtagtttagggaacggcaactgccgtcttctcgaagcaagggggccacctcgttcatcatttcccttacatgcatattttcccgcaccaaatccattaggaggcgctctcctcctagtgatagaagttcttgtagtgaggaaaagtttttcagcggttttagaccgtcagccatgggcattttggaaagagtttgctgcaaaagttctagtctgttccacagttcagtgatgtgttctatggcatctcgatccagcagacctcctcgtttcgcgggtttggacggctcctggagtagggtatgagacgatgggcgtccagcgctgccagggttcggtccttccagggtctcagtgttcgagtcagggttgtttccgtcacagtgaaggggtgtgcgcctgcttgggcgcttgccagggtgcgcttcagactcattctgctggtggagaacttctgtcgcttggcgccctgtatgtcggccaagtagcagtttaccatgagttcgtagttgagcgcctcggctgcgtggcctttggcgcggagcttacctttggaagttttcttgcataccgggcagtataggcatttcagcgcatacagcttgggcgcaaggaaaatggattctggggagtatgcatccgcgccgcaggaggcgcaaacagtttcacattccaccagccaggttaaatccggttcattggggtcaaaaacaagttttccgccatattttttgatgcgtttcttacctttggtctccataagttcgtgtcctcgttgagtgacaaacaggctgtccgtatctccgtagactgattttacaggcctcttctccagtggagtgcctcggtcttcttcgtacaggaactctgaccactctgatacaaaggcgcgcgtccaggccagcacaaaggaggctatgtgggaggggtagcgatcgttgtcaaccagggggtccaccttttccaaagtatgcaaacacatgtcaccctcttcaacatccaggaatgtgattggcttgtaggtgtatttcacgtgacctggggtccccgctgggggggtataaaagggggcggttctttgctcttcctcactgtcttccggatcgctgtccaggaacgtcagctgttggggtaggtattccctctcgaaggcgggcatgacctctgcactcaggttgtcagtttctaagaacgaggaggatttgatattgacagtgccggttgagatgcctttcatgaggttttcgtccatttggtcagaaaacacaatttttttattgtcaagtttggtggcaaatgatccatacagggcgttggataaaagtttggcaatggatcgcatggtttggttcttttccttgtccgcgcgctctttggcggcgatgttgagttggacatactcgcgtgccaggcacttccattcggggaagatagttgttaattcatctggcacgattctcacttgccaccctcgattatgcaaggtaattaaatccacactggtggccacctcgcctcgaaggggttcattggtccaacagagcctacctcctttcctagaacagaaagggggaagtgggtctagcataagttcatcgggagggtctgcatccatggtaaagattcccggaagtaaatccttatcaaaatagctgatgggagtggggtcatctaaggccatttgccattctcgagctgccagtgcgcgctcatatgggttaaggggactgccccagggcatgggatgggtgagagcagaggcatacatgccacagatgtcatagacgtagatgggatcctcaaagatgcctatgtaggttggatagcatcgcccccctctgatacttgctcgcacatagtcatatagttcatgtgatggcgctagcagccccggacccaagttggtgcgattgggtttttctgttctgtagacgatctggcgaaagatggcgtgagaattggaagagatggtgggtctttgaaaaatgttgaaatgggcatgaggtagacctacagagtctctgacaaagtgggcataagattcttgaagcttggttaccagttcggcggtgacaagtacgtctagggcgcagtagtcaagtgtttcttgaatgatgtcataacctggttggtttttcttttcccacagttcgcggttgagaaggtattcttcgcgatccttccagtactcttctagcggaaacccgtctttgtctgcacggtaagatcctagcatgtagaactgattaactgccttgtaagggcagcagcccttctctacgggtagagagtatgcttgagcagcttttcgtagcgaagcgtgagtaagggcaaaggtgtctctgaccatgactttgagaaattggtatttgaagtccatgtcgtcacaggctccctgttcccagagttggaagtctacccgtttcttgtaggcggggttgggcaaagcgaaagtaacatcattgaagagaatcttaccggctctgggcataaaattgcgagtgatgcggaaaggctgtggtacttccgctcgattgttgatcacctgggcagctaggacgatttcgtcgaaaccgttgatgttgtgtcctacgatgtataattctatgaaacgcggcgtgcctctgacgtgaggtagcttactgagctcatcaaaggttaggtctgtggggtcagataaggcgtagtgttcgagagcccattcgtgcaggtgaggatttgcatgtaggaatgatgaccaaagatctaccgccagtgctgtttgtaactggtcccgatactgacgaaaatgccggccaattgccattttttctggagtgacacagtagaaggttctggggtcttgttgccatcgatcccacttgagtttaatggctagatcgtgggccatgttgacgagacgctcttctcctgagagtttcatgaccagcatgaaaggaactagttgtttgccaaaggatcccatccaggtgtaagtttccacatcgtaggtcaggaagagtctttctgtgcgaggatgagagccgatcgggaagaactggatttcctgccaccagttggaggattggctgttgatgtgatggaagtagaagtttctgcggcgcgccgagcattcgtgtttgtgcttgtacagacggccgcagtagtcgcagcgttgcacgggttgtatctcgtgaatgagctgtacctggcttcccttgacgagaaatttcagtgggaagccgaggcctggcgattgtatctcgtgctcttctatattcgctgtatcggcctgttcatcttctgtttcgatggtggtcatgctgacgagcccccgcgggaggcaagtccagacctcggcgcgggaggggcggagctgaaggacgagagcgcgcaggctggagctgtccagagtcctgagacgctgcggactcaggttagtaggtagggacagaagattaacttgcatgatcttttccagggcgtgcgggaggttcagatggtacttgatttccacaggttcgtttgtagagacgtcaatggcttgcagggttccgtgtcctttgggcgccactaccgtacctttgttttttcttttgatcggtggtggctctcttgcttcttgcatgctcagaagcggtgacggggacgcgcgccgggcggcagcggttgttccggacccgggggcatggctggtagtggcacgtcggcgccgcgcacgggcaggttctggtattgcgctctgagaagacttgcgtgcgccaccacgcgtcgattgacgtcttgtatctgacgtctctgggtgaaagctaccggccccgtgagcttgaacctgaaagagagttcaacagaatcaatttcggtatcgttaacggcagcttgtctcagtatttcttgtacgtcaccagagttgtcctggtaggcgatctccgccatgaactgctcgatttcttcctcctgaagatctccgcgacccgctctttcgacggtggccgcgaggtcattggagatacggcccatgagttgggagaatgcattcatgcccgcctcgttccagacgcggctgtaaaccacggccccctcggagtctcttgcgcgcatcaccacctgagcgaggttaagctccacgtgtctggtgaagaccgcatagttgcataggcgctgaaaaaggtagttgagtgtggtggcaatgtgttcggcgacgaagaaatacatgatccatcgtctcagcggcatttcgctaacatcgcccagagcttccaagcgctccatggcctcgtagaagtccacggcaaaattaaaaaactgggagtttcgcgcggacacggtcaattcctcctcgagaagacggatgagttcggctatggtggcccgtacttcgcgttcgaaggctcccgggatctcttcttcctcttctatctcttcttccactaacatctcttcttcgtcttcaggcgggggcggagggggcacgcggcgacgtcgacggcgcacgggcaaacggtcgatgaatcgttcaatgacctctccgcggcggcggcgcatggtttcagtgacggcgcggccgttctcgcgcggtcgcagagtaaaaacaccgccgcgcatctccttaaagtggtgactgggaggttctccgtttgggagggagagggcgctgattatacattttattaattggcccgtagggactgcgcgcagagatctgatcgtgtcaagatccacgggatctgaaaacctttcgacgaaagcgtctaaccagtcacagtcacaaggtaggctgagtacggcttcttgtgggcgggggtggttatgtgttcggtctgggtcttctgtttcttcttcatctcgggaaggtgagacgatgctgctggtgatgaaattaaagtaggcagttctaagacggcggatggtggcgaggagcaccaggtctttgggtccggcttgctggatacgcaggcgattggccattccccaagcattatcctgacatctagcaagatctttgtagtagtcttgcatgagccgttctacgggcacttcttcctcacccgttctgccatgcatacgtgtgagtccaaatccgcgcattggttgtaccagtgccaagtcagctacgactctttcggcgaggatggcttgctgtacttgggtaagggtggcttgaaagtcatcaaaatccacaaagcggtggtaagcccctgtattaatggtgtaagcacagttggccatgactgaccagttaactgtctggtgaccagggcgcacgagctcggtgtatttaaggcgcgaataggcgcgggtgtcaaagatgtaatcgttgcaggtgcgcaccagatactggtaccctataagaaaatgcggcggtggttggcggtagagaggccatcgttctgtagctggagcgccaggggcgaggtcttccaacataaggcggtgatagccgtagatgtacctggacatccaggtgattcctgcggcggtagtagaagcccgaggaaactcgcgtacgcggttccaaatgttgcgtagcggcatgaagtagttcattgtaggcacggtttgaccagtgaggcgcgcgcagtcattgatgctctatagacacggagaaaatgaaagcgttcagcgactcgactccgtagcctggaggaacgtgaacgggttgggtcgcggtgtaccccggttcgagacttgtactcgagccggccggagccgcggctaacgtggtattggcactcccgtctcgacccagcctacaaaaatccaggatacggaatcgagtcgttttgctggtttccgaatggcagggaagtgagtcctattttttttttttttgccgctcagatgcatcccgtgctgcgacagatgcgcccccaacaacagcccccctcgcagcagcagcagcagcaaccacaaaaggctgtccctgcaactactgcaactgccgccgtgagcggtgcgggacagcccgcctatgatctggacttggaagagggcgaaggactggcacgtctaggtgcgccttcgcccgagcggcatccgcgagttcaactgaaaaaagattctcgcgaggcgtatgtgccccaacagaacctatttagagacagaagcggcgaggagccggaggagatgcgagcttcccgctttaacgcgggtcgtgagctgcgtcacggtttggaccgaagacgagtgttgcgagacgaggatttcgaagttgatgaagtgacagggatcagtcctgccagggcacacgtggctgcagccaaccttgtatcggcttacgagcagacagtaaaggaagagcgtaacttccaaaagtcttttaataatcatgtgcgaaccctgattgcccgcgaagaagttacccttggtttgatgcatttgtgggatttgatggaagctatcattcagaaccctactagcaaacctctgaccgcccagctgtttctggtggtgcaacacagcagagacaatgaggctttcagagaggcgctgctgaacatcaccgaacccgaggggagatggttgtatgatcttatcaacattctacagagtatcatagtgcaggagcggagcctgggcctggccgagaaggtagctgccatcaattactcggttttgagcttgggaaaatattacgctcgcaaaatctacaagactccatacgttcccatagacaaggaggtgaagatagatgggttctacatgcgcatgacgctcaaggtcttgaccctgagcgatgatcttggggtgtatcgcaatgacagaatgcatcgcgcggttagcgccagcaggaggcgcgagttaagcgacagggaactgatgcacagtttgcaaagagctctgactggagctggaaccgagggtgagaattacttcgacatgggagctgacttgcagtggcagcctagtcgcagggctctgagcgccgcgacggcaggatgtgagcttccttacatagaagaggcggatgaaggcgaggaggaagagggcgagtacttggaagactgatggcacaacccgtgttttttgctagatggaacagcaagcaccggatcccgcaatgcgggcggcgctgcagagccagccgtccggcattaactcctcggacgattggacccaggccatgcaacgtatcatggcgttgacgactcgcaaccccgaagcctttagacagcaaccccaggccaaccgtctatcggccatcatggaagctgtagtgccttcccgatctaatcccactcatgagaaggtcctggccatcgtgaacgcgttggtggagaacaaagctattcgtccagatgaggccggactggtatacaacgctctcttagaacgcgtggctcgctacaacagtagcaatgtgcaaaccaatttggaccgtatgataacagatgtacgcgaagccgtgtctcagcgcgaaaggttccagcgtgatgccaacctgggttcgctggtggcgttaaatgctttcttgagtactcagcctgctaatgtgccgcgtggtcaacaggattatactaactttttaagtgctttgagactgatggtatcagaagtacctcagagcgaagtgtatcagtccggtcctgattacttctttcagactagcagacagggcttgcagacggtaaatctgagccaagcttttaaaaaccttaaaggtttgtggggagtgcatgccccggtaggagaaagagcaaccgtgtctagcttgttaactccgaactcccgcctgttattactgttggtagctcctttcaccgacagcggtagcatcgaccgtaattcctatttgggttacctactaaacctgtatcgcgaagccatagggcaaagtcaggtggacgagcagacctatcaagaaattacccaagtcagtcgcgctttgggacaggaagacactggcagtttggaagccactctgaacttcttgcttaccaatcggtctcaaaagatccctcctcaatatgctcttactgcggaggaggagaggatccttagatatgtgcagcagagcgtgggattgtttctgatgcaagagggggcaactccgactgcagcactggacatgacagcgcgaaatatggagcccagcatgtatgccagtaaccgacctttcattaacaaactgctggactacttgcacagagctgccgctatgaactctgattatttcaccaatgccatcttaaacccgcactggctgcccccacctggtttctacacgggcgaatatgacatgcccgaccctaatgacggatttctgtgggacgacgtggacagcgatgttttttcacctctttctgatcatcgcacgtggaaaaaggaaggcggtgatagaatgcattcttctgcatcgctgtccggggtcatgggtgctaccgcggctgagcccgagtctgcaagtccttttcctagtctacccttttctctacacagtgtacgtagcagcgaagtgggtagaataagtcgcccgagtttaatgggcgaagaggagtacctaaacgattccttgctcagaccggcaagagaaaaaaatttcccaaacaatggaatagaaagtttggtggataaaatgagtagatggaagacttatgctcaggatcacagagacgagcctgggatcatggggactacaagtagagcgagccgtagacgccagcgccatgacagacagaggggtcttgtgtgggacgatgaggattcggccgatgatagcagcgtgttggacttgggtgggagaggaaggggcaacccgtttgctcatttgcgccctcgcttgggtggtatgttgtgaaaaaaaataaaaaagaaaaactcaccaaggccatggcgacgagcgtacgttcgttcttctttattatctgtgtctagtataatgaggcgagtcgtgctaggcggagcggtggtgtatccggagggtcctcctccttcgtacgagagcgtgatgcagcagcagcaggcgacggcggtgatgcaatccccactggaggctccctttgtgcctccgcgatacctggcacctacggagggcagaaacagcattcgttactcggaactggcacctcagtacgataccaccaggttgtatctggtggacaacaagtcggcggacattgcttctctgaactatcagaatgaccacagcaacttcttgaccacggtggtgcagaacaatgactttacccctacggaagccagcacccagaccattaactttgatgaacgatcgcggtggggcggtcagctaaagaccatcatgcatactaacatgccaaacgtgaacgagtatatgtttagtaacaagttcaaagcgcgtgtgatggtgtccagaaaacctcccgacggtgctgcagttggggatacttatgatcacaagcaggatattttggaatatgagtggttcgagtttactttgccagaaggcaacttttcagttactatgactattgatttgatgaacaatgccatcatagataattacttgaaagtgggtagacagaatggagtgcttgaaagtgacattggtgttaagttcgacaccaggaacttcaagctgggatgggatcccgaaaccaagttgatcatgcctggagtgtatacgtatgaagccttccatcctgacattgtcttactgcctggctgcggagtggattttaccgagagtcgtttgagcaaccttcttggtatcagaaaaaaacagccatttcaagagggttttaagattttgtatgaagatttagaaggtggtaatattccggccctcttggatgtagatgcctatgagaacagtaagaaagaacaaaaagccaaaatagaagctgctacagctgctgcagaagctaaggcaaacatagttgccagcgactctacaagggttgctaacgctggagaggtcagaggagacaattttgcgccaacacctgttccgactgcagaatcattattggccgatgtgtctgaaggaacggacgtgaaactcactattcaacctgtagaaaaagatagtaagaatagaagctataatgtgttggaagacaaaatcaacacagcctatcgcagttggtatctttcgtacaattatggcgatcccgaaaaaggagtgcgttcctggacattgctcaccacctcagatgtcacctgcggagcagagcaggtttactggtcgcttccagacatgatgaaggatcctgtcactttccgctccactagacaagtcagtaactaccctgtggtgggtgcagagcttatgcccgtcttctcaaagagcttctacaacgaacaagctgtgtactcccagcagctccgccagtccacctcgcttacgcacgtcttcaaccgctttcctgagaaccagattttaatccgtccgccggcgcccaccattaccaccgtcagtgaaaacgttcctgctctcacagatcacgggaccctgccgttgcgcagcagtatccggggagtccaacgtgtgaccgttactgacgccagacgccgcacctgtccctacgtgtacaaggcactgggcatagtcgcaccgcgcgtcctttcaagccgcactttctaaaaaaaaaatgtccattcttatctcgcccagtaataacaccggttggggtctgcgcgctccaagcaagatgtacggaggcgcacgcaaacgttctacccaacatcccgtgcgtgttcgcggacattttcgcgctccatggggtgccctcaagggccgcactcgcgttcgaaccaccgtcgatgatgtaatcgatcaggtggttgccgacgcccgtaattatactcctactgcgcctacatctactgtggatgcagttattgacagtgtagtggctgacgctcgcaactatgctcgacgtaagagccggcgaaggcgcattgccagacgccaccgagctaccactgccatgcgagccgcaagagctctgctacgaagagctagacgcgtggggcgaagagccatgcttagggcggccagacgtgcagcttcgggcgccagcgccggcaggtcccgcaggcaagcagccgctgtcgcagcggcgactattgccgacatggcccaatcgcgaagaggcaatgtatactgggtgcgtgacgctgccaccggtcaacgtgtacccgtgcgcacccgtccccctcgcacttagaagatactgagcagtctccgatgttgtgtcccagcggcgaggatgtccaagcgcaaatacaaggaagaaatgctgcaggttatcgcacctgaagtctacggccaaccgttgaaggatgaaaaaaaaccccgcaaaatcaagcgggttaaaaaggacaaaaaagaagaggaagatggcgatgatgggctggcggagtttgtgcgcgagtttgccccacggcgacgcgtgcaatggcgtgggcgcaaagttcgacatgtgttgagacctggaacttcggtggtctttacacccggcgagcgttcaagcgctacttttaagcgttcctatgatgaggtgtacggggatgatgatattcttgagcaggcggctgaccgattaggcgagtttgcttatggcaagcgtagtagaataacttccaaggatgagacagtgtcaatacccttggatcatggaaatcccacccctagtcttaaaccggtcactttgcagcaagtgttacccgtaactccgcgaacaggtgttaaacgcgaaggtgaagatttgtatcccactatgcaactgatggtacccaaacgccagaagttggaggacgttttggagaaagtaaaagtggatccagatattcaacctgaggttaaagtgagacccattaagcaggtagcgcctggtctgggggtacaaactgtagacattaagattcccactgaaagtatggaagtgcaaactgaacccgcaaagcctactgccacctccactgaagtgcaaacggatccatggatgcccatgcctattacaactgacgccgccggtcccactcgaagatcccgacgaaagtacggtccagcaagtctgttgatgcccaattatgttgtacacccatctattattcctactcctggttaccgaggcactcgctactatcgcagccgaaacagtacctcccgccgtcgccgcaagacacctgcaaatcgcagtcgtcgccgtagacgcacaagcaaaccgactcccggcgccctggtgcggcaagtgtaccgcaatggtagtgcggaacctttgacactgccgcgtgcgcgttaccatccgagtatcatcacttaatcaatgttgccgctgcctccttgcagatatggccctcacttgtcgccttcgcgttcccatcactggttaccgaggaagaaactcgcgccgtagaagagggatgttgggacgcggaatgcgacgctacaggcgacggcgtgctatccgcaagcaattgcggggtggttttttaccagccttaattccaattatcgctgctgcaattggcgcgataccaggcatagcttccgtggcggttcaggcctcgcaacgacattgacattggaaaaaaaacgtataaataaaaaaaaatacaatggactctgacactcctggtcctgtgactatgttttcttagagatggaagacatcaatttttcatccttggctccgcgacacggcacgaagccgtacatgggcacctggagcgacatcggcacgagccaactgaacgggggcgccttcaattggagcagtatctggagcgggcttaaaaattttggctcaaccataaaaacatacgggaacaaagcttggaacagcagtacaggacaggcgcttagaaataaacttaaagaccagaacttccaacaaaaagtagtcgatgggatagcttccggcatcaatggagtggtagatttggctaaccaggctgtgcagaaaaagataaacagtcgtttggacccgccgccagcaaccccaggtgaaatgcaagtggaggaagaaattcctccgccagaaaaacgaggcgacaagcgtccgcgtcccgatttggaagagacgctggtgacgcgcgtagatgaaccgccttcttatgaggaagcaacgaagcttggaatgcccaccactagaccgatagccccaatggccaccggggtgatgaaaccttctcagttgcatcgacccgtcaccttggatttgccccctccccctgctgctactgctgtacccgcttctaagcctgtcgctgccccgaaaccagtcgccgtagccaggtcacgtcccgggggcgctcctcgtccaaatgcgcactggcaaaatactctgaacagcatcgtgggtctaggcgtgcaaagtgtaaaacgccgtcgctgcttttaattaaatatggagtagcgcttaacttgcctatctgtgtatatgtgtcattacacgccgtcacagcagcagaggaaaaaaggaagaggtcgtgcgtcgacgctgagttactttcaagatggccaccccatcgatgctgccccaatgggcatacatgcacatcgccggacaggatgcttcggagtacctgagtccgggtctggtgcagttcgcccgcgccacagacacctacttcaatctgggaaataagtttagaaatcccaccgtagcgccgacccacgatgtgaccaccgaccgtagccagcggctcatgttgcgcttcgtgcccgttgaccgggaggacaatacatactcttacaaagtgcggtacaccctggccgtgggcgacaacagagtgctggatatggccagcacgttctttgacattaggggcgtgttggacagaggtcccagtttcaaaccctattctggtacggcttacaactctctggctcctaaaggcgctccaaatgcatctcaatggattgcaaaaggcgtaccaactgcagcagccgcaggcaatggtgaagaagaacatgaaacagaggagaaaactgctacttacacttttgccaatgctcctgtaaaagccgaggctcaaattacaaaagagggcttaccaataggtttggagatttcagctgaaaacgaatctaaacccatctatgcagataaactttatcagccagaacctcaagtgggagatgaaacttggactgacctagacggaaaaaccgaagagtatggaggcagggctctaaagcctactactaacatgaaaccctgttacgggtcctatgcgaagcctactaatttaaaaggtggtcaggcaaaaccgaaaaactcggaaccgtcgagtgaaaaaattgaatatgatattgacatggaattttttgataactcatcgcaaagaacaaacttcagtcctaaaattgtcatgtatgcagaaaatgtaggtttggaaacgccagacactcatgtagtgtacaaacctggaacagaagacacaagttccgaagctaatttgggacaacagtctatgcccaacagacccaactacattggcttcagagataactttattggactcatgtactataacagtactggtaacatgggggtgctggctggtcaagcgtctcagttaaatgcagtggttgacttgcaggacagaaacacagaactttcttaccaactcttgcttgactctctgggcgacagaaccagatactttagcatgtggaatcaggctgtggacagttatgatcctgatgtacgtgttattgaaaatcatggtgtggaagatgaacttcccaactattgttttccactggacggcataggtgttccaacaaccagttacaaatcaatagttccaaatggagaagataataataattggaaagaacctgaagtaaatggaacaagtgagatcggacagggtaatttgtttgccatggaaattaaccttcaagccaatctatggcgaagtttcctttattccaatgtggctctgtatctcccagactcgtacaaatacaccccgtccaatgtcactcttccagaaaacaaaaacacctacgactacatgaacgggcgggtggtgccgccatctctagtagacacctatgtgaacattggtgccaggtggtctctggatgccatggacaatgtcaacccattcaaccaccaccgtaacgctggcttgcgttaccgatctatgcttctgggtaacggacgttatgtgcctttccacatacaagtgcctcaaaaattcttcgctgttaaaaacctgctgcttctcccaggctcctacacttatgagtggaactttaggaaggatgtgaacatggttctacagagttccctcggtaacgacctgcgggtagatggcgccagcatcagtttcacgagcatcaacctctatgctacttttttccccatggctcacaacaccgcttccacccttgaagccatgctgcggaatgacaccaatgatcagtcattcaacgactacctatctgcagctaacatgctctaccccattcctgccaatgcaaccaatattcccatttccattccttctcgcaactgggcggctttcagaggctggtcatttaccagactgaaaaccaaagaaactccctctttggggtctggatttgacccctactttgtctattctggttctattccctacctggatggtaccttctacctgaaccacacttttaagaaggtttccatcatgtttgactcttcagtgagctggcctggaaatgacaggttactatctcctaacgaatttgaaataaagcgcactgtggatggcgaaggctacaacgtagcccaatgcaacatgaccaaagactggttcttggtacagatgctcgccaactacaacatcggctatcagggcttctacattccagaaggatacaaagatcgcatgtattcatttttcagaaacttccagcccatgagcaggcaggtggttgatgaggtcaattacaaagacttcaaggccgtcgccataccctaccaacacaacaactctggctttgtgggttacatggctccgaccatgcgccaaggtcaaccctatcccgctaactatccctatccactcattggaacaactgccgtaaatagtgttacgcagaaaaagttcttgtgtgacagaaccatgtggcgcataccgttctcgagcaacttcatgtctatgggggcccttacagacttgggacagaatatgctctatgccaactcagctcatgctctggacatgacctttgaggtggatcccatggatgagcccaccctgctttatcttctcttcgaagttttcgacgtggtcagagtgcatcagccacaccgcggcatcatcgaggcagtctacctgcgtacaccgttctcggccggtaacgctaccacgtaagaagcttcttgcttcttgcaaatagcagctgcaaccatggcctgcggatcccaaaacggctccagcgagcaagagctcagagccattgtccaagacctgggttgcggaccctattttttgggaacctacgataagcgcttcccggggttcatggcccccgataagctcgcctgtgccattgtaaatacggccggacgtgagacggggggagagcactggttggctttcggttggaacccacgttctaacacctgctacctttttgatccttttggattctcggatgatcgtctcaaacagatttaccagtttgaatatgagggtctcctgcgccgcagcgctcttgctaccaaggaccgctgtattacgctggaaaaatctacccagaccgtgcagggcccccgttctgccgcctgcggacttttctgctgcatgttccttcacgcctttgtgcactggcctgaccgtcccatggacggaaaccccaccatgaaattgctaactggagtgccaaacaacatgcttcattctcctaaagtccagcccaccctgtgtgacaatcaaaaagcactctaccattttcttaatacccattcgccttattttcgctctcatcgtacacacatcgaaagggccactgcgttcgaccgtatggatgttcaataatgactcatgtaaacaacgtgttcaataaacatcactttatttttttacatgtatcaaggctctggattacttatttatttacaagtcgaatgggttctgacgagaatcagaatgacccgcaggcagtgatacgttgcggaactgatacttgggttgccacttgaattcgggaatcaccaacttgggaaccggtatatcgggcaggatgtcactccacagctttctggtcagctgcaaagctccaagcaggtcaggagccgaaatcttgaaatcacaattaggaccagtgctctgagcgcgagagttgcggtacaccggattgcagcactgaaacaccatcagcgacggatgtctcacgcttgccagcacggtgggatctgcaatcatgcccacatccagatcttcagcattggcaatgctgaacggggtcatcttgcaggtctgcctacccatggcgggcacccaattaggcttgtggttgcaatcgcagtgcagggggatcagtatcatcttggcctgatcctgtctgattcctggatacacggctctcatgaaagcatcatattgcttgaaagcctgctgggctttactaccctcggtataaaacatcccgcaggacctgctcgaaaactggttagctgcacagccggcatcattcacacagcagcgggcgtcattgttggctatttgcaccacacttctgccccagcggttttgggtgattttggttcgctcgggattctcctttaaggctcgttgtccgttctcgctggccacatccatctcgataatctgctccttctgaatcataatattgccatgcaggcacttcagcttgccctcataatcattgcagccatgaggccacaacgcacagcctgtacattcccaattatggtgggcgatctgagaaaaagaatgtatcattccctgcagaaatcttcccatcatcgtgctcagtgtcttgtgactagtgaaagttaactggatgcctcggtgctcttcgtttacgtactggtgacagatgcgcttgtattgttcgtgttgctcaggcattagtttaaaacaggttctaagttcgttatccagcctgtacttctccatcagcagacacatcacttccatgcctttctcccaagcagacaccaggggcaagctaatcggattcttaacagtgcaggcagcagctcctttagccagagggtcatctttagcgatcttctcaatgcttcttttgccatccttctcaacgatgcgcacgggcgggtagctgaaacccactgctacaagttgcgcctcttctctttcttcttcgctgtcttgactgatgtcttgcatggggatatgtttggtcttccttggcttctttttggggggtatcggaggaggaggactgtcgctccgttccggagacagggaggattgtgacgtttcgctcaccattaccaactgactgtcggtagaagaacctgaccccacacggcgacaggtgtttttcttcgggggcagaggtggaggcgattgcgaagggctgcggtccgacctggaaggcggatgactggcagaaccccttccgcgttcgggggtgtgctccctgtggcggtcgcttaactgatttccttcgcggctggccattgtgttctcctaggcagagaaacaacagacatggaaactcagccattgctgtcaacatcgccacgagtgccatcacatctcgtcctcagcgacgaggaaaaggagcagagcttaagcattccaccgcccagtcctgccaccacctctaccctagaagataaggaggtcgacgcatctcatgacatgcagaataaaaaagcgaaagagtctgagacagacatcgagcaagacccgggctatgtgacaccggtggaacacgaggaagagttgaaacgctttctagagagagaggatgaaaactgcccaaaacagcgagcagataactatcaccaagatgctggaaatagggatcagaacaccgactacctcatagggcttgacggggaagacgcgctccttaaacatctagcaagacagtcgctcatagtcaaggatgcattattggacagaactgaagtgcccatcagtgtggaagagctcagctgcgcctacgagcttaaccttttttcacctcgtactccccccaaacgtcagccaaacggcacctgcgagccaaatcctcgcttaaacttttatccagcttttgctgtgccagaagtactggctacctatcacatcttttttaaaaatcaaaaaattccagtctcctgccgcgctaatcgcacccgcgccgatgccctactcaatctgggacctggttcacgcttacctgatatagcttccttggaagaggttccaaagatcttcgagggtctgggcaataatgagactcgggccgcaaatgctctgcaaaagggagaaaatggcatggatgagcatcacagcgttctggtggaattggaaggcgataatgccagactcgcagtactcaagcgaagcgtcgaggtcacacacttcgcatatcccgctgtcaacctgccccctaaagtcatgacggcggtcatggaccagttactcattaagcgcgcaagtcccctttcagaagacatgcatgacccagatgcctgtgatgagggtaaaccagtggtcagtgatgagcagctaacccgatggctgggcaccgactctccccgggatttggaagagcgtcgcaagcttatgatggccgtggtgctggttaccgtagaactagagtgtctccgacgtttctttaccgattcagaaaccttgcgcaaactcgaagagaatctgcactacacttttagacacggctttgtgcggcaggcatgcaagatatctaacgtggaactcaccaacctggtttcctacatgggtattctgcatgagaatcgcctaggacaaagcgtgctgcacagcacccttaagggggaagcccgccgtgattacatccgcgattgtgtctatctctacctgtgccacacgtggcaaaccggcatgggtgtatggcagcaatgtttagaagaacagaacttgaaagagcttgacaagctcttacagaaatctcttaaggttctgtggacagggttcgacgagcgcaccgtcgcttccgacctggcagacctcatcttcccagagcgtctcagggttactttgcgaaacggattgcctgactttatgagccagagcatgcttaacaattttcgctctttcatcctggaacgctccggtatcctgcccgccacctgctgcgcactgccctccgactttgtgcctctcacctaccgcgagtgccccccgccgctatggagtcactgctacctgttccgtctggccaactatctctcctaccactcggatgtgatcgaggatgtgagcggagacggcttgctggagtgccactgccgctgcaatctgtgcacgccccaccggtccctagcttgcaacccccagttgatgagcgaaacccagataataggcacctttgaattgcaaggccccagcagccaaggcgatgggtcttctcctgggcaaagtttaaaactgaccccgggactgtggacctccgcctacttgcgcaagtttgctccggaagattaccacccctatgaaatcaagttctatgaggaccaatcacagcctccaaaggccgaactttcggcttgcgtcatcacccagggggcaattctggcccaattgcaagccatccaaaaatcccgccaagaatttctactgaaaaagggtaagggggtctaccttgacccccagaccggcgaggaactcaacacaaggttccctcaggatgtcccaacgacgagaaaacaagaagttgaaggtgcagccgccgcccccagaagatatggaggaagattgggacagtcaggcagaggaggcggaggaggacagtctggaggacagtctggaggaagacagtttggaggaggaaaacgaggaggcagaggaggtggaagaagtaaccgccgacaaacagttatcctcggctgcggagacaagcaacagcgctaccatctccgctccgagtcgaggaacccggcggcgtcccagcagtagatgggacgagaccggacgcttcccgaacccaaccagcgcttccaagaccggtaagaaggatcggcagggatacaagtcctggcgggggcataagaatgccatcatctcctgcttgcatgagtgcgggggcaacatatccttcacgcggcgctacttgctattccaccatggggtgaactttccgcgcaatgttttgcattactaccgtcacctccacagcccctactatagccagcaaatcccgacagtctcgacagataaagacagcggcggcgacctccaacagaaaaccagcagcggcagttagaaaatacacaacaagtgcagcaacaggaggattaaagattacagccaacgagccagcgcaaacccgagagttaagaaatcggatctttccaaccctgtatgccatcttccagcagagtcggggtcaagagcaggaactgaaaataaaaaaccgatctctgcgttcgctcaccagaagttgtttgtatcacaagagcgaagatcaacttcagcgcactctcgaggacgccgaggctctcttcaacaagtactgcgcgctgactcttaaagagtaggcagcgaccgcgcttattcaaaaaaggcgggaattacatcatcctcgacatgagtaaagaaattcccacgccttacatgtggagttatcaaccccaaatgggattggcagcaggcgcctcccaggactactccacccgcatgaattggctcagcgccgggccttctatgatttctcgagttaatgatatacgcgcctaccgaaaccaaatacttttggaacagtcagctcttaccaccacgccccgccaacaccttaatcccagaaattggcccgccgccctagtgtaccaggaaagtcccgctcccaccactgtattacttcctcgagacgcccaggccgaagtccaaatgactaatgcaggtgcgcagttagctggcggctccaccctatgtcgtcacaggcctcggcataatataaaacgcctgatgatcagaggccgaggtatccagctcaacgacgagtcggtgagctctccgcttggtctacgaccagacggaatctttcagattgccggctgcgggagatcttccttcacccctcgtcaggctgttctgactttggaaagttcgtcttcgcaaccccgctcgggcggaatcgggaccgttcaatttgtagaggagtttactccctctgtctacttcaaccccttctccggatctcctgggcactacccggacgagttcataccgaacttcgacgcgattagcgagtcagtggacggctacgattgatgtctggtgacgcggctgagctatctcggctgcgacatctagaccactgccgccgctttcgctgctttgcccgggaacttattgagttcatctacttcgaactccccaaggatcaccctcaaggtccggcccacggagtgcggattactatcgaaggcaaaatagactctcgcctgcaacgaattttctcccagcggcccgtgctgatcgagcgagaccagggaaacaccacggtttccatctactgcatttgtaatcaccccggattgcatgaaagcctttgctgtcttatgtgtactgagtttaataaaaactgaattaagactctcctacggactgccgcttcttcaacccggattttacaaccagaagaacaaaacttttcctgtcgtccaggactctgttaacttcacctttcctactcacaaactagaagctcaacgactacaccgcttttccagaagcattttccctactaatactactttcaaaaccggaggtgagctccacggtctccctacagaaaacccttgggtggaagcgggccttgtagtactaggaattcttgcgggtgggcttgtgattattctttgctacctatacacaccttgcttcactttcctagtggtgttgtggtattggtttaaaaaatggggcccatactagtcttgcttgttttactttcgcttttggaaccgggttctgccaattacgatccatgtctagactttgacccagaaaactgcacacttacttttgcacccgacacaagccgcatctgtggagttcttattaagtgcggatgggaatgcaggtccgttgaaattacacacaataacaaaacctggaacaataccttatccaccacatgggagccaggagttcccgagtggtacactgtctctgtccgaggtcctgacggttccatccgcattagtaacaacactttcattttttctgaaatgtgcgatctggccatgttcatgagcaaacagtattctctatggcctcctagcaaggacaacatcgtaacgttctccattgcttattgcttgtgcgcttgccttcttactgctttactgtgcgtatgcatacacctgcttgtaaccactcgcatcaaaaacgccaataacaaagaaaaaatgccttaacctctttctgtttacagacatggcttctcttacatctctcatatttgtcagcattgtcactgccgctcacggacaaacagtcgtctctatcccactaggacataattacactctcataggacccccaatcacttcagaggtcatctggaccaaactgggaagcgttgattactttgatataatctgtaacaaaacaaaaccaataatagtaacttgcaacatacaaaatcttacattgattaatgttagcaaagtttacagcggttactattatggttatgacagatacagtagtcaatatagaaattacttggttcgtgttacccagttgaaaaccacgaaaatgccaaatatggcaaagattcgatccgatgacaattctctagaaacttttacatctcccaccacacccgacgaaaaaaacatcccagattcaatgattgcaattgttgcagcggtggcagtggtgatggcactaataataatatgcatgcttttatatgcttgtcgctacaaaaagtttcatcctaaaaaacaagatctcctactaaggcttaacatttaatttctttttatacagccatggtttccactaccacattccttatgcttactagtctcgcaactctgacttctgctcgctcacacctcactgtaactataggctcaaactgcacactaaaaggacctcaaggtggtcatgtcttttggtggagaatatatgacaatggatggtttacaaaaccatgtgaccaacctggtagatttttctgcaacggcagagacctaaccattatcaacgtgacagcaaatgacaaaggcttctattatggaaccgactataaaagtagtttagattataacattattgtactgccatctaccactccagcaccccgcacaactactttctctagcagcagtgtcgctaacaatacaatttccaatccaacctttgccgcgcttttaaaacgcactgtgaataattctacaacttcacatacaacaatttccacttcaacaatcagcatcatcgctgcagtgacaattggaatatctattcttgtttttaccataacctactacgcctgctgctatagaaaagacaaacataaaggtgatccattacttagatttgatatttaatttgttctttttttttatttacagtatggtgaacaccaatcatggtacctagaaatttcttcttcaccatactcatctgtgcttttaatgtttgcgctactttcacagcagtagccacagcaaccccagactgtataggagcatttgcttcctatgcactttttgcttttgttacttgcatctgcgtatgtagcatagtctgcctggttattaattttttccaacttctagactggatccttgtgcgaattgcctacctgcgccaccatcccgaataccgcaaccaaaatatcgcggcacttcttagactcatctaaaaccatgcaggctatactaccaatatttttgcttctattgcttccctacgctgtctcaaccccagctgcctatagtactccaccagaacaccttagaaaatgcaaattccaacaaccgtggtcatttcttgcttgctatcgagaaaaatcagaaatccccccaaatttaataatgattgctggaataattaatataatctgttgcaccataatttcatttttgatataccccctatttgattttggctggaatgctcccaatgcacatgatcatccacaagacccagaggaacacattcccccacaaaacatgcaacatccaatagcgctaatagattacgaaagtgaaccacaacccccactactccctgctattagttacttcaacctaaccggcggagatgactgaaacactcaccacctccaattccgccgaggatctgctcgatatggacggccgcgtctcagaacaacgacttgcccaactacgcatccgccagcagcaggaacgcgtggccaaagagctcagagatgtcatccaaattcaccaatgcaaaaaaggcatattctgtttggtaaaacaagccaagatatcctacgagatcaccgctactgaccatcgcctctcttacgaacttggcccccaacgacaaaaatttacctgcatggtgggaatcaaccccatagttatcacccaacaaagtggagatactaagggttgcattcactgctcctgcgattccatcgagtgcacctacaccctgctgaagaccctatgcggcctaagagacctgctaccaatgaattaaaaaaaaatgattaataaaaaatcacttacttgaaatcagcaataaggtctctgttgaaattttctcccagcagcacctcacttccctcttcccaactctggtattctaaaccccgttcagcggcatactttctccatactttaaaggggatgtcaaattttagctcctctcctgtacccacaatcttcatgtctttcttcccagatgaccaagagagtccggctcagtgactccttcaaccctgtctacccctatgaagatgaaagcacctcccaacacccctttataaacccagggtttatttccccaaatggcttcacacaaagcccagacggagttcttactttaaaatgtttaaccccactaacaaccacaggcggatctctacagctaaaagtgggagggggacttacagtggatgacactgatggtaccttacaagaaaacatacgtgctacagcacccattactaaaaataatcactctgtagaactatccattggaaatggattagaaactcaaaacaataaactatgtgccaaattgggaaatgggttaaaatttaacaacggtgacatttgtataaaggatagtattaacaccttatggactggaataaaccctccacctaactgtcaaattgtggaaaacactaatacaaatgatggcaaacttactttagtattagtaaaaaatggagggcttgttaatggctacgtgtctctagttggtgtatcagacactgtgaaccaaatgttcacacaaaagacagcaaacatccaattaagattatattttgactcttctggaaatctattaactgaggaatcagacttaaaaattccacttaaaaataaatcttctacagcgaccagtgaaactgtagccagcagcaaagcctttatgccaagtactacagcttatcccttcaacaccactactagggatagtgaaaactacattcatggaatatgttactacatgactagttatgatagaagtctatttcccttgaacatttctataatgctaaacagccgtatgatttcttccaatgttgcctatgccatacaatttgaatggaatctaaatgcaagtgaatctccagaaagcaacatagctacgctgaccacatccccctttttcttttcttacattacagaagacgacaactaaaataaagtttaagtgtttttatttaaaatcacaaaattcgagtagttattttgcctccaccttcccatttgacagaatacaccaatctctccccacgcacagctttaaacatttggataccattagagatagacattgttttagattccacattccaaacagtttcagagcgagccaatctggggtcagtgatagataaaaatccatcgcgatagtcttttaaagcgctttcacagtccaactgctgcggatgcgactccggagtttggatcacggtcatctggaagaagaacgatgggaatcataatccgaaaacggtatcggacgattgtgtctcatcaaacccacaagcagccgctgtctgcgtcgctccgtgcgactgctgtttatgggatcagggtccacagtttcctgaagcatgattttaatagcccttaacatcaactttctggtgcgatgcgcgcagcaacgcattctgatttcactcaaatctttgcagtaggtacaacacattattacaatattgtttaataaaccataattaaaagcgctccagccaaaactcatatctgatataatcgcccctgcatgaccatcataccaaagtttaatataaattaaatgacgttccctcaaaaacacactacccacatacatgatctcttttggcatgtgcatattaacaatctgtctgtaccatggacaacgttggttaatcatgcaacccaatataaccttccggaaccacactgccaacaccgctcccccagccatgcattgaagtgaaccctgctgattacaatgacaatgaagaacccaattctctcgaccgtgaatcacttgagaatgaaaaatatctatagtggcacaacatagacataaatgcatgcatcttctcataatttttaactcctcaggatttagaaacatatcccagggaataggaagctcttgcagaacagtaaagctggcagaacaaggaagaccacgaacacaacttacactatgcatagtcatagtatcacaatctggcaacagcgggtggtcttcagtcatagaagctcgggtttcattttcctcacaacgtggtaactgggctctggtgtaagggtgatgtctggcgcatgatgtcgagcgtgcgcgcaaccttgtcataatggagttgcttcctgacattctcgtattttgtatagcaaaacgcggccctggcagaacacactcttcttcgccttctatcctgccgcttagcgtgttccgtgtgatagttcaagtacagccacactcttaagttggtcaaaagaatgctggcttcagttgtaatcaaaactccatcgcatctaattgttctgaggaaatcatccacggtagcatatgcaaatcccaaccaagcaatgcaactggattgcgtttcaagcaggagaggagagggaagagacggaagaaccatgttaatttttattccaaacgatctcgcagtacttcaaattgtagatcgcgcagatggcatctctcgcccccactgtgttggtgaaaaagcacagctaaatcaaaagaaatgcgattttcaaggtgctcaacggtggcttccaacaaagcctccacgcgcacatccaagaacaaaagaataccaaaagaaggagcattttctaactcctcaatcatcatattacattcctgcaccattcccagataattttcagctttccagccttgaattattcgtgtcagttcttgtggtaaatccaatccacacattacaaacaggtcccggagggcgccctccaccaccattcttaaacacaccctcataatgacaaaatatcttgctcctgtgtcacctgtagcgaattgagaatggcaacatcaattgacatgcccttggctctaagttcttctttaagttctagttgtaaaaactctctcatattatcaccaaactgcttagccagaagccccccgggaacaagagcaggggacgctacagtgcagtacaagcgcagacctccccaattggctccagcaaaaacaagattggaataagcatattgggaaccaccagtaatatcatcgaagttgctggaaatataatcaggcagagtttcttgtagaaattgaataaaagaaaaatttgccaaaaaaacattcaaaacctctgggatgcaaatgcaataggttaccgcgctgcgctccaacattgttagttttgaattagtctgcaaaaataaaaaaaaaacaagcgtcatatcatagtagcctgacgaacaggtggataaatcagtctttccatcacaagacaagccacagggtctccagctcgaccctcgtaaaacctgtcatcgtgattaaacaacagcaccgaaagttcctcgcggtgaccagcatgaataagtcttgatgaagcatacaatccagacatgttagcatcagttaaggagaaaaaacagccaacatagcctttgggtataattatgcttaatcgtaagtatagcaaagccacccctcgcggatacaaagtaaaaggcacaggagaataaaaaatataattatttctctgctgctgtttaggcaacgtcgcccccggtccctctaaatacacatacaaagcctcatcagccatggcttaccagagaaagtacagcgggcacacaaaccacaagctctaaagtcactctccaacctctccacaatatatatacacaagccctaaactgacgtaatgggactaaagtgtaaaaaatcccgccaaacccaacacacaccccgaaactgcgtcaccagggaaaagtacagtttcacttccgcaatcccaacaagcgtcacttcctctttctcacggtacgtcacatcccattaacttacaacgtcattttcccacggccgcgccgccccttttaaccgttaaccccacagccaatcaccacacggcccacactttttaaaatcacctcatttacatattggcaccattccatctataaggtatattattgatgatgggccagtgaattgtaatacgactcactatagggcgaattgggccctctagatgcatgctcgagcggccgccagtgtgatggatatctgcagaattcgcccttccttaattaacctgcag

SEQ ID NO: 14 - DNA, 36015 bp, Adenovirus C1
  MISC_FEATURE (1)..(36015): Complete Genome
ttaattaacatcatcaataatataccttattttggattgaagccaatatgataatgagggggtggagtttgtgacgtggcgcggggcgtgggaacggggcgggtgacgtagtagtgtggcggaagtgtgatgttgcaagtgtggcggaacacatgtaagcgacggatgtggtaaaagtgacgtttttggtgtgcgccggtgtacacgggaagtgacaattttcgcgcggttttaggcggatgttgtagtaaatttgggcgtaaccgagtaagatttggccattttcgcgggaaaactgaataagaggaagtgaaatctgaataattctgtgttactcatagcgcgtaatatttgtctagggccgcggggactttgaccgtttacgtggagactcgcccaggtgtttttctcaggtgttttccgcgttccgggtcaaagttggcgttttattattatagtcagctgacgtgtagtgtatttatacccggtgagttcctcaagaggccactcttgagtgccagcgagtagagttttctcctccgagccgctccgacaccgggactgaaaatgagacatattatttgccacggaggtgttattaccgaagaaatggccgccagtcttttggaccagctaatcgaagaggtactggctgataatcttccacctcctagccattttgaaccacctacccttcacgaactgtatgatttagacgtgacggcccccgaagatcccaacgaggaggcggtttcgcagatttttcctgactctgtaatgttggcggcgcaggaagggattgacttactcacttttccgccggcgcccggttctccggagccgcctcacctttcccggcagcccgagcagccggagcagagagccttgggtccggtttctatgccaaaccttgtaccggaggtgatcgatcttacctgccacgaggctggctttccacccagtgacgacgaggatgaagagggtgaggagtttgtgttagattatgtggagcagcccgggcacggttgcaggtcttgtcattatcatcggaggaatacgggggacccagatattatgtgttcgctttgctatatgaggacctgtggcatgtttgtctacagtaagtgaaattatgggcagtgggtgatagagtggtgggttcggtgtggtaattttttttttaattttttgcagttttgtggtttaaagaattttgtattgtgattttttttaaaaggtcctgtgtctgaacctgagcctgagcccgagccagaaccggaacctgcaagacctgcccggcgtcctaaaatggtgcctgctatcctgagacgcccgacatcacctgtgtccagagaatgcaatagtagtacggatagctgtgactccggtccttctaacacacctcctgagatacatccggtggtcccgctgtgccccattaaaccagttgccgtgagagttggtgggcgtcgccgggctgtggaatgtatcgaggacttgcttaacgagcctgggcaacctttggacttgagctgtaaacgccccaggccataaggtgtaaacctgtgattgcgtgtgtggttaacgcctttgtttgctgaatgagttgatgtaagtttaataaaaagggtgagataatgtttaacttgcatggcgtgttaaatggggcggggcttaaagggtatataatgcgccgtgggctaatcttggttacatttgacctcatggaggcttgggagtgtttggaagatttttctgctgtgcgtaacttgctggaacagagctctaacagtacctcctggttttggaggtttctgtggggctcctcccaagcaaagttagtctgcagaattaaggaggattacaagtgggaatttgaagagcttttgaaatcctgtggtgagctgtttgattctttgaatctgggtcaccaggcgcttttccaagagaaggtcatcaagactttggatttttccacaccggggcgcgctgcggctgctgttgcttttttgagttttataaaggataaatggagcgaagaaacccatctgagcggggggtacctgctggattttctggccatgcatttgtggagagcggtggtgagacacaagaatcgcctactactgttgtcttccgtccgcccggcaataataccgacggaggagcagcagcagcaacagcagcagcaggaggaagccaggcggcggcggcggcaggagcagagcccatggaacccgagagccggcctggaccctcgggaatgaatgttgtacaggtggctgaactgtttccagaactgagacgcattttaacaattaacgaggatgggcaggggctaaagggggtaaagagggagcggggggcttttgaggctacagaggaggttaggaatttaacttttagcttaatgaccagacaccgtcctgagtgtgttacttttcagcagattaaggataattgcgctaatgagcttgatctgctggcgcagaagtattccatagagcagctgaccacttactggctgcagccaggggatgattttgaggaggctattagggtatatgcaaaggtggcacttaggccagattgcaagtacaagattagcaaacttgtaaatattaggaattgttgctacatttctgggaacggggccgaggtggagatagatacggaggatagggtggcctttagatgtagcatgataaatatgtggccgggggtacttggcatggacggggtggttattatgaatgtgaggtttactggccccaattttagcggtacggttttcctggccaataccaaccttatcctacacggtgtaagcttctatgggtttaacaatacctgcgtggaagcctggaccgatgtaagggttcgaggctgtgccttttactgctgctggaagggggtggtgtgtcgccccaaaagcagggcttcaattaagaaatgcctctttgaaaggtgtaccttgggtatcctgtctgagggtaactccagggtgcgccacaatgtggcctccgactgtggttgcttcatgctagtgaaaagcgtggctgtgattaagcataacatggtgtgtggcaactgcgaggacagggcctctcagatgctaacctgctcggacggcaactgtcacctgctgaagaccattcacgtagccagccactctcgcaaggcctggccagtgtttgagcacaacatactgacccgctgttccttgcatttgggtaacaggaggggggtgttcctaccttaccaatgcaatttgagtcacactaagatattgcttgagcccgaaagcatgtccaaggtgaacctgaacggggtgtttgacatgaccatgaagatctggaaggtgctgaggtacgatgagacccgcaccaggtgcagaccctgcgagtgtggcggtaaacatattaggaaccagcctgtgatgctggatgtgaccgaggagctgaggcccgatcacttggtgctggcctgcacccgcgctgagtttggctctagcgatgaagatacagattgaggtactgaaatgtgtgggcgtggcttaagggtgggaaagaatatataaggtgggggtctcatgtagttttgtatctgttttgcagcagccgccgccatgagcaccaactcgtttgatggaagcattgtgagctcatatttgacaacgcgcatgcccccatgggccggggtgcgtcagaatgtgatgggctccagcattgatggtcgccccgtcctgcccgcaaactctactaccttgacctacgagaccgtgtctggaacgccgttggagactgcagcctccgccgccgcttcagccgctgcagccaccgcccgcgggattgtgactgactttgctttcctgagcccgcttgcaagcagtgcagcttcccgttcatccgcccgcgatgacaagttgacggctcttttggcacaattggattctttgacccgggaacttaatgtcgtttctcagcagctgttggagctgcgccagcaggtttctgccctgaaggcttcctcccctcccaatgcggtttaaaacataaataaaaaccagactctgtttggatttggatcaagcaagtgtattgctgtctttatttaggggttttgcgcgcgcggtaggcccgggaccagcggtctcggtcgttgagggtcctgtgtattttttccaggacgtggtagagatggctctggatgttcagatacatgggcataagcccgtctctggggtggaggtagcaccactgcagagcttcatgctgcggggtggtgttgtagatgatccagtcgtagcaggagcgctgggcgtggtgcctaaaaatgtcctttagaagcaagctgattgccaggggcaggcccttggtgtaagtgtttacaaagcggttaagctgggatgggtgcatacgtggggatatgagatgcatcttggactgtatttttaggttggctatgttcccagccatatccctcctgggattcatgttgtgcagaaccaccagcacagtgtatccggtgcacttgggaaatttgtcatgtagcttagaaggaaatgcgtggaagaacttggagacgcccttgtgacctccaagattttccatgcattcgtccataatgatggcaatgggcccacgggcggcggcctgggcgaagatatttctgggatcactaacgtcatagttgtgttccaggatgagatcgtcataggccatttttacaaagcgcgggcggagggtgccagactgcggtataatggttccatccggcccaggggcgtagttaccctcacagatttgcatttcccacgctttgagttcagatggggggatcatgtctacctgcggggcaataaagaaaacggtttccggggtaggggagatcagctgggaagaaagcaggttcctgagcagctgcgacttaccgcagccggtgggcccgtaaatcacacctattaccggctgcaactggtagttaagagagctgcagctgccgtcatccctgagcaagggggccacttcgttaagcatgtccctgacacgcatgttttccctgaccaaatccgctagaaggcgctcgccgcccagcgatagcagttcttgcaaggaagcaaagtttttcaacggtttgaggccgtccgccgtaggcatgcttttgagcgtttgaccaagcagttccaggcggtcccacagctcggtcacgtgctctacggcatctcgatccagcatatctcctcgtttcgcgggttggggcggctttcgctgtacggcagtagtcggtgctcgtccagacgggccagggtcatgtctttccacgggcgcagggtcctcgtcagcgtagtctgggtcacggtgaaggggtgcgctccgggctgcgcgctggccagggtgcgcttgaggctggtcctgctggtgctgaagcgctgccggtcttcgccctgcgcgtcggccaggtagcatttgaccatggtgtcatagtccagcccctccgcggcatggcccttggcgcgcagcttgcccttggaggaggcgccgcacgaggggcagtgcagacttttgagggcgtagagcttgggcgcgagaaataccgattccggggagtaggcatccgcgccgcaggccccgcagacggtctcgcattccacgagccaggtgagctctggccgttcggggtcaaaaaccaggtttcccccatgctttttgatgcgtttcttacctctggtttccatgagccggtgtccacgctcggtgacgaaaaggctgtccgtgtccccgtatacagacttgagaggcctgtcctcgagcggtgttccgcggtcctcctcgtatagaaactcggaccactctgagacgaaggctcgcgtccaggccagcacgaaggaggctaagtgggaggggtagcggtcgttgtccactagggggtccactcgctccagggtgtgaagacacatgtccccctcttcggcatcaaggaaggtgattggtttataggtgtatgccacgtgaccgggtgttcctgaagggggggtataaaagggggtgggggcgcgttcgtcctcactctcttccgcatcgctgtctgcgagggccagctgttggggtgagtactccctctggaaagcgggcatgacttctgcgctaaggttgtcagtttccaaaaacgaggaggatttgatattcacctggcccgcggtgatgcctttgagggtggccgcgtccatctggtcagaaaagacaatctttttgttgtcaagcttggtggcaaacgacccgtagagggcgttggacagcaacttggcgatggagcgcagggtttggtttttgtcgcgatcggcgcgctccttggccgcgatgtttagctgcacgtattcgcgcgcaacgcaccgccattcgggaaagacggtggtgcgctcgtcgggcaccaggtgcacgcgccaaccgcggttgtgcagggtgacaaggtcaacgctggtggctacctctccgcgtaggcgctcgttggtccagcagaggcggccgcccttgcgcgagcagaatggcggtagggggtctagctgcgtctcgtccggggggtccgcgtccacggtaaagatcccgggcaacaggcgcgcgtcgaagtagtctatcttgcatccttgcaagtctaacgcctgctgccatgcgcgggcggcaagcgcgcgctcgtatgggttgagtgggggaccccatggcatggggtgggtgagcgcggaggcgtacatgccgcagatgtcgtaaacgtagaggggctccctgagtattccaagatatgtagggtagcatcttccaccgcggatgctggcgcgcacgtaatcgtatagttcgtgcgagggggcgaggagttcgggaccgaggttgctacgggcgggctgctctgctcggaagacgatctgcctgaagatggcatgcgagttcgatgatatggttggacgctggaagacgttgaagctggcgtctgtaagacctaccgcatcacgcacgaaggaggcgtaggagtcgcgcagcttgttgaccagctcggcggtgacctgcacgtctagggcacagtagtccagggtttccttgatgatgtcatacttatcctgtcccttttttttccacagctcgcggttgaggacaaactcttcgcggtctttccagtactcttggatcggaaacccgtcggcctccgaacggtaagagcctagcatgtagaactggttgacggcctggtaggcgcagcatcccttttctacgggtagcgcgtatgcctgcgcggccttccggagcgaggtgtgggtgagcgcaaaggtgtccctgaccatgactttgaggtactggtatttgaagtcagtgtcgtcgcatccgccctgctcccagagcaaaaagtccgtgcgctttttggaacgcgggtttggtagggcgaaggtgacatcgttgaagagtatctttcccgcgcgaggcataaaattgcgtgtgatgcggaagggtcccggcacctcggaacggttgttaattacctgggcggcgagcacgatctcgtcaaagccgttgatgttgtggcccacgatgtaaagttccaagaagcgcggggtgcccttaatggagggcaattttttaagttcttcgtaggtaagctcttcaggggagttgagcccgtgctctgacagggcccagtctgcaagatgagggttggaagcaacgaatgagctccacaggtcacgggccattagcatttgcagatggtcgcgaaaggtcctaaactggcgacctacggccattttttctggggtgatgcagtagaaggtaagcgggtcttgttcccagcggtcccatccaaggtccacggctaggtctcgcgcggcggtcactagaggctcatctccgccgaatttcatgaccagcatgaagggcacgagctgcttcccaaaggcccccatccaagtataggtctctacatcgtaggtgacaaagagacgctcggtgcgaggatgcgagccgatcgggaagaactggatctcccgccaccagttggaggagtggctgttgatgtggtgaaagtagaagtccctgcgacgggccgaacactcgtgctggcttttgtaaaaacgtgcgcagtactggcagcggtgcacgggctgtacatcctgcacgaggttgacctgacgaccgcgcacaaggaagcagagtgggaatttgagcccctcgcctggcgggtttggctggtggtcttctacttcggctgcttgtccttgaccgtctggctgctcgaggggagttacggtggatcggaccaccacgccgcgcgagcccaaagtccagatgtccgcgcgcggcggtcggagcttgatgacaacatcgcgcaaatgggagctgtccatggtctggagctcccgcggcgtcaggtcaggcgggagctcctgcaggtttacctcgcatagccgggtcagggcgcgggctaggtccaggtgatacctgatttccaggggctggttggtggcggcgtcgatggcttgcaagaggccgcatccccgcggcgcgactacggtaccgcgcggcgggcggtgggccgcgggggtgtccttggatgatgcatctaaaagcggtgacgcgggcgggcccccggaggtagggggggctcgggacccgccgggagagggggcaggggcacgtcggcgccgcgcgcgggcaggagctggtgctgcgcacggaggttgctggcgaacgcgacgacgcggcggttgatctcctgaatctggcgcctctgcgtgaagacgacgggcccggtgagcttgaacctgaaagagagttcgacagaatcaatttcggtgtcgttgacggcggcctggcgcaaaatctcctgcacgtctcctgagttgtcttgataggcgatctcggccatgaactgctcgatctcttcctcctggagatctccgcgtccggctcgctccacggtggcggcgaggtcgttggagatgcgggccatgagctgcgagaaggcgttgaggcctccctcgttccagacgcggctgtagaccacgcccccttcggcatcgcgggcgcgcatgaccacctgcgcgagattgagctccacgtgccgggcgaagacggcgtagtttcgcaggcgctgaaagaggtagttgagggtggtggcggtgtgttctgccacgaagaagtacataacccagcgtcgcaacgtggattcgttgatatcccccaaggcctcaaggcgctccatggcctcgtagaagtccacggcgaagttgaaaaactgggagttgcgcgccgacacggttaactcctcctccagaagacggatgagctcggcgacagtgtcgcgcacctcgcgctcaaaggctacaggggcctcttcttcttcaatctcctcttccataagggcctccccttcttcttcttctggcggcggtgggggaggggggacacggcggcgacgacggcgcaccgggaggcggtcgacaaagcgctcgatcatctccccgcggcgacggcgcatggtctcggtgacggcgcggccgttctcgcgggggcgcagttggaagacgccgcccgtcatgtcccggttatgggttggcggggggctgccgtgcggcagggatacggcgctaacgatgcatctcaacaattgttgtgtaggtactccgccaccgagggacctgagcgagtccgcatcgaccggatcggaaaacctctcgagaaaggcgtctaaccagtcacagtcgcaaggtaggctgagcaccgtggcgggcggcagcgggcggcggtcggggttgtttctggcggaggtgctgctgatgatgtaattaaagtaggcggtcttgagacggcggatggtcgacagaagcaccatgtccttgggtccggcctgctgaatgcgcaggcggtcggccatgccccaggcttcgttttgacatcggcgcaggtctttgtagtagtcttgcatgagcctttctaccggcacttcttcttctccttcctcttgtcctgcatctcttgcatctatcgctgcggcggcggcggagtttggccgtaggtggcgccctcttcctcccatgcgtgtgaccccgaagcccctcattggctgaagcagggccaggtcggcgacaacgcgctcggctaatatggcctgctgcacctgcgtgagggtagactggaagtcatccatgtcaacaaagcggtggtatgcgcccgtgttgatggtgtaagtgcagttggccataacggaccagttaacggtctggtggcccggctgcgagagctcggtgtatctgagacgcgagtaagcccttgagtcaaagacgtagtcgttgcaagtccgcacgaggtactggtatcctaccaaaaagtgcggcggcggctggcggtagaggggccagcgtagggtggccggggctccgggggcgaggtcttccaacataaggcgatgatatccgtagatgtacctggacatccaggtgatgccggcggcggtggtggaggcgcgcggaaagtcgcggacgcggttccagatgttgcgcagcggcaaaaagtgctccatggtcgggacgctctggccggtcaggcgcgcgcagtcgttgacgctctagaccgtgcaaaaggagagcctgtaagcgggcactcttccgtggtctggtggataaattcgcaagggtatcatggcggacgaccggggttcgagccccgtatccggccgtccgccgtgatccatgcggttaccgcccgcgtgtcgaacccaggtgtgcgacgtcagacaacgggggagcgctccttttggcttccttccaggcgcggcggctgctgcgctagctttttttggccactggccgcgcgcggcgtaagcggttaggctggaaagcgaaagcattaagtggctcgctccctgtagccggagggttattttccaagggttgagtcgcgggacccccggttcgagtctcgggccggccggactgcggcgaacgggggtttgcctccccgtcatgcaagaccccgcttgcaaattcctccggaaacagggacgagccccttttttgcttttcccagatgcatccggtgctgcggcagatgcgcccccctcctcagcagcggcaagagcaagagcagcggcagacatgcagggcaccctccccttctcctaccgcgtcaggaggggcaacatccgcggctgacgcggcggcagatggtgattacgaacccccgcggcgccgggcccggcactacctggacttggaggagggcgagggcctggcgcggctaggagcgccctctcctgagcgacacccaagggtgcagctgaagcgtgacacgcgcgaggcgtacgtgccgcggcagaacctgtttcgtgaccgcgagggagaggagcccgaggagatgcgggatcgaaagttccatgcagggcgcgagttgcggcatggcctgaaccgcgagcggttgctgcgcgaggaggactttgagcccgacgcgcggaccgggattagtcccgcgcgcgcacacgtggcggccgccgacctggtaaccgcgtacgagcagacggtgaaccaggagattaactttcaaaaaagctttaacaaccacgtgcgcacgcttgtagcgcgcgaggaggtggctataggactgatgcatctgtgggactttgtaagcgcgctggagcaaaacccaaatagcaagccgctcatggcgcagttgtttcttatagtgcagcacagcagggacaacgaggcattcagggatgcgctgttaaacatagtagagcccgagggccgctggctgctcgatttgataaatattctgcagagcatagtggtgcaggagcgcagcttgagcctggctgacaaggtggccgccattaactattccatgctcagtctgggcaagttttacgcccgcaagatataccataccccttacgttcccatagacaaggaggtaaagatcgaggggttctacatgcgcatggcgctgaaggtgcttaccttgagcgacgacctgggcgtttatcgcaacgagcgcatccacaaggccgtgagcgtgagccggcggcgcgagctcagcgaccgcgagctgatgcacagcctgcaaagggccctggctggcacgggcagcggcgatagagaggccgagtcctactttgacgcgggcgctgacctgcgctgggccccaagccgacgcgccctggaggcagctggggccggacctgggctggcggtggcacccgcgcgcgctggcaacgtcggcggcgtggaggaatatgacgaggacgatgagtacgagccagaggacggcgagtactaagcggtgatatttctgatcagatgatgcaagacgcaacggacccggcggtgcgggcggcgctgcagagccagccgtccggccttaactccacggacgactggcgccaggtcatggaccgcatcatgtcgctgactgcgcgcaaccctgacgcgttccggcagcagccacaggccaaccggctctccgcaattctggaagcggtggtcccggcgcgcgcaaaccccacgcacgagaaggtgctggcgatcgtaaacgcgctggccgaaaacagggccatccggcccgatgaggccggcctggtctacgacgcgctgcttcagcgcgtggctcgttacaacagcggcaacgtgcagaccaacctggaccggctggtgggggatgtgcgcgaggccgtggcgcagcgtgagcgcgcgcagcagcagggcaacctgggctccatggttgcactaaacgccttcctgagtacacagcccgccaacgtgccgcggggacaggaggactacaccaactttgtgagcgcactgcggctaatggtgactgagacaccgcaaagtgaggtgtaccagtccgggccagactattttttccagaccagtagacaaggcctgcagaccgtaaacctgagccaggctttcaagaacttgcaggggctgtggggggtgcgggctcccacaggcgaccgcgcgaccgtgtctagcttgctgacgcccaactcgcgcctgttgctgctgctaatagcgcccttcacggacagtggcagcgtgtcccgggacacatacctaggtcacttgctgacactgtaccgagaggccataggtcaggcgcatgtggacgagcatactttccaggagattacaagtgttagccgcgcgctggggcaggaggacacgggcagcctggaggcaaccctgaactacctgctgaccaaccggcggcagaagatcccctcgttgcacagtttaaacagcgaggaggagcgcattttgcgctatgtgcagcagagcgtgagccttaacctgatgcgcgacggggtaacgcccagcgtggcgctggacatgaccgcgcgcaacatggaaccgggcatgtatgcctcaaaccggccgtttatcaatcgcctaatggactacttgcatcgcgcggccgccgtgaaccccgagtatttcaccaatgccatcttgaacccgcactggctaccgccccctggtttctacaccgggggatttgaggtgcccgagggtaacgatggattcctctgggacgacatagacgacagcgtgttttccccgcaaccgcagaccctgctagagttgcaacagcgcgagcaggcagaggcggcgctgcgaaaggaaagcttccgcaggccaagcagcttgtccgatctaggcgctgcggccccgcggtcagatgctagtagcccatttccaagcttgatagggtctcttaccagcactcgcaccacccgcccgcgcctgctaggcgaggaggagtacctaaacaactcgttgctgcagccgcagcgcgaaaagaacctgcctccggcgtttcccaacaacgggatagagagcctagtggacaagatgagtagatggaagacgtatgcgcaggagcacagggatgtgcccggcccgcgcccgcccacccgtcgtcaaaggcacgaccgtcagcggggtctggtgtgggaggacgatgactcggcagacgacagcagcgtcctggatttgggagggagtggcaacccgtttgcgcaccttcgccccaggctggggagaatgttttaaaaaaaaaaaagcatgatgcaaaataaaaaactcaccaaggccatggcaccgagcgttggttttcttgtattccccttagtatgcggcgcgcggcgatgtatgaggaaggtcctcctccctcctacgagagcgtggtgagcgcggcgccagtggcggcggcgctgggttcccccttcgatgctcccctggacccgccgttcgtgcctccgcggtacctgcggcctaccggggggagaaacagcatccgttactctgagttggcacccctattcgacaccacccgtgtgtaccttgtggacaacaagtcaacggatgtggcatccctgaactaccagaacgaccacagcaactttctaaccacggtcattcaaaacaatgactacagcccgggggaggcaagcacacagaccatcaatcttgacgaccggtcgcactggggcggcgacctgaaaaccatcctgcataccaacatgccaaatgtgaacgagttcatgtttaccaataagtttaaggcgcgggtgatggtgtcgcgctcgcttactaaggacaaacaggtggagctgaaatatgagtgggtggagttcacgctgcccgagggcaactactccgagacaatgaccatagaccttatgaacaacgcgatcgtggagcactacttgaaagtgggcaggcagaacggggttctggaaagcgacatcggggtaaagtttgacacccgcaacttcagactggggtttgacccagtcactggtcttgtcatgcctggggtatatacaaacgaagccttccatccagacatcattttgctgccaggatgcggggtggacttcacccacagccgcctgagcaacttgttgggcatccgcaagcggcaacccttccaggagggctttaggatcacctacgatgacctggagggtggtaacattcccgcactgttggatgtggacgcctaccaggcaagcttgaaagatgacaccgaacagggcgggggtggcgcaggcggcggcaacaacagtggcagcggcgcggaagagaactccaacgcggcagccgcggcaatgcagccggtggaggacatgaacgatcatgccattcgcggcgacacctttgccacacgggcggaggagaagcgcgctgaggccgaggcagcggccgaagctgccgcccccgctgcggaggctgcacaacccgaggtcgagaagcctcagaagaaaccggtgattaaacccctgacagaggacagcaagaaacgcagttacaacctaataagtaatgacagcaccttcacccagtaccgcagctggtaccttgcatacaactacggcgaccctcaggccgggatccgctcatggaccctgctttgcactcctgacgtaacctgcggctcggagcaggtatactggtcgttgcccgacatgatgcaagaccccgtgaccttccgctccacgagccagatcagcaactttccggtggtgggcgccgagctgttgcccgtgcactccaagagcttctacaacgaccaggccgtctactcccagctcatccgccagtttacctctctgacccacgtgttcaatcgctttcccgagaaccagattttggcgcgcccgccagcccccaccatcaccaccgtcagtgaaaacgttcctgctctcacagatcacgggacgctaccgctgcgcaacagcatcggaggagtccagcgagtgaccattactgacgccagacgccgcacctgcccctacgtttacaaggccctgggcatagtctcgccgcgcgtcctatcgagccgcactttttgagcaagcatgtccatccttatatcgcccagcaataacacaggctggggcctgcgtttcccaagcaagatgtttggcggggccaagaagcgctccgaccaacacccagtgcgcgtgcgcgggcactaccgcgcgccctggggcgcgcacaaacgcggccgcactgggcgcaccaccgtcgatgacgccatcgacgcggtggtggaggaggcgcgcaactacacgcccacgccgccgccagtgtccaccgtggacgcggccattcagaccgtggtgcgcggagcccggcgctatgctaaaatgaagagacggcggaggcgcgtagcacgtcgccaccgccgccgacccggcactgccgcccaacgcgcggcggcggccctgcttaaccgcgcacgtcgcaccggccgacgggcggccatgcgagccgctcgaaggctggccgcgggtattgtcactgtgccccccaggtccaggcgacgagcggccgccgcagcagccgcggccattagtgctatgactcagggtcgcaggggcaacgtgtactgggtgcgcgactcggttagcggcctgcgcgtgcccgtgcgcacccgccccccgcgcaactagattgcaataaaaaactacttagactcgtactgttgtatgtatccagcggcggcggcgcgcatcgaagctatgtccaagcgcaaaatcaaagaagagatgctccaggtcatcgcgccggagatctatggccccccgaagaaggaagagcaggattacaagccccgaaagctaaagcgggtcaaaaagaaaaagaaagatgatgatgatgaacttgacgacgaggtggaactgttgcacgcgaccgcgcccaggcggcgggtacagtggaaaggtcgacgcgtaagacgtgttttgcgacccggcaccaccgtagtctttacgcccggtgagcgctccacccgcacctacaagcgcgtgtatgatgaggtgtacggcgacgaggacctgcttgagcaggccaacgagcgcctcggggagtttgcctacggaaagcggcataaggacatgctggcgttgccgctggacgagggcaacccaacacctagcctaaagcccgtgacactgcagcaggtgctgcccgcgcttgcaccgtccgaagaaaagcgcggcctaaagcgcgagtctggtgacttggcgcccaccgtgcagctcatggtgcccaagcgccaacgactggaagatgtcttggaaaaaatgaccgtggagcctgggctggagcccgaggtccgcgtgcgaccaatcaagcaggtggcaccgggactgggcgtgcagaccgtggacgttcagatacccaccaccagtagcactagtattgccactgccacagagggcatggagacacaaacgtccccggtcgcctcggcggtggcagatgccgcggtgcaggcggccgctgcggccgcgtccaaaacctctacggaggtgcaaacggacccgtggatgtttcgcgtttcagccccccggcgtccgcgccgttcgaggaagtacggcgccgccagcgcgctactgcccgaatatgccctacatccttccatcgcgcctacccccggctatcgtggctacacctaccgccccagaagacgagcaactacccgacgccgaatcaccactggaacccgccgccgccgtcgccgtcgccagcccgtgctggccccgatttccgtgcgcagggtggctcgcgaaggaggcaggaccctggtgctgccaacagcgcgctaccaccccagcatcgtttaaaagccggtctttgtggttcttgcagatatggccctcacctgccgcctccgtttcccggtgccgggattccgaggaagaatgcaccgtaggaggggcatggccggccacggcctgacgggcggcatgcgtcgtgcgcaccaccggcggcggcgcgcgtcgcaccgtcgcatgcgcggcggtatcctgcccctccttattccactgatcgccgcggcgattggcgccgtgcccggaattgcatccgtggccttgcaggcgcagagacactgattaaaaacaagttgcatgtggaaaaatcaaaataaaaagtctggactctcacgctcgcttggtcctgtaactattttgtagaatggaagacatcaactttgcgtctctggccccgcgacacggctcgcgcccgttcatgggaaactggcaagatatcggcaccagcaatatgagcggtggcgccttcagctggggctcgctgtggagcggcattaaaaatttcggttccaccgttaagaactatggcagcaaggcctggaacagcagcacaggccaaatgctgagggacaagttgaaagagcaaaatttccaacaaaaggtggtagatggcctggcctctggcattagcggggtggtggacctggccaaccaggcagtgcaaaataagattaacagtaagcttgatccccgccctcccgtagaggagcctccaccggccgtggagacagtgttgccagatgggcgtggcgaaaagcgcccgcgccccgacagggaagagactctggtgacacaaatcgacgagcctccctcgtacgaggaggcgctaaagcaaggcctgcccaccacccgtcccatcgcgcccatggctaccggagtgttgggccagcacacacctgtaacgctggacctgcctccccccgctgacacccagcagaaacctgtgctgccagggccgtccgccgttgttgtaacccgccctagccgcgcgtccctgcgccgtgccgccagcggtccgcgatcgttgcggcccgtagccagtggcaactggcaaagcacactgaacagcatcgtgggtctgggggtgcaatccctaaagcgccgacgatgcttttgaatagctaacgtgtcgtatgtgtgtcatgtatgcgtccatgtcgccgccagaggagctgctgagtcgccgcgcgcccgctttccaagatggctaccccttcgatgatgccgcagtggtcttacatgcacatctcgggccaggacgcctcggagtacctgagccccgggctggtgcagttcgcccgcgccaccgagacgtacttcagcctgaataacaagtttagaaaccccacggtggcgcctacgcacgacgtgaccacagaccggtctcagcgtttgacgctgcggtttatccccgtggaccgcgaggataccgcatactcgtacaaggcgcggtttaccctggctgtgggtgacaaccgtgtgcttgacatggcttccacatactttgacattcgcggcgtgctggaccggggccccacttttaagccctactccggcactgcctacaacgctctagcccccaaaggcgctcccaattcctgcgagtgggaacaagaagaaccaactcaggaaatggctgaagaacttgaagatgaggaggaggcagaggaggaggaggcagaggaggaggcagaagcaccacaagctgatcagaaggttaagaagactcatgtatatgctcaggctcctttggcaggggaaaaaattaccgccaatggcttacaaatagtttctgatacccaaactgaaggcaatccagtttttgccgatcccacttatcaacctgaacctcaggttggagaatctcagtggaatgaagctgaagcaactgcatctggaggcagagtactaaaaaagactactcccatgaaaccatgctacggatcgtatgccagacctacaaataaaaatgggggtcaaggtatactagtagcaaacaaccaaggtgctctagagtctaaagttgaaatgcagttttttgccccctctggcactgccatgaatgaaagaaatgctgttcagccaagtattgttttgtacagtgaggatgttaatatggaaactcctgatactcacatttcatacaaaccaagcaaaactgatgaaaactctaaggctatgttgggtcaacaagcaatgccaaacagacccaattacatcgcttttagggacaattttattggccttatgtattacaacagcactggtaacatgggtgtccttgctggacaagcatcacagctaaatgccgtggtagacttgcaggacagaaacacagagctgtcatatcaacttttgcttgattctattggcgatagaaccagatacttttccatgtggaatcaggctgtagacagctatgatccagatgtcagaatcattgaaaatcatggaactgaggatgagttgccaaattactgcttcccacttggcggtataggggtaactgacacctaccaaggtataaaatcaaacggaaacggtaatcctcaaaactggaccaaaaatgacgattttgcggcacgtaatgaaataggtgtgggaaacaactttgccctggagattaaccttaatgccaacctatggagaaatttcctctactccaacattgcactgtacctgcctgacaagctaaaatacactcctacaaatgtggaaatatctcccaaccctaattcatacgattatatgaacaagcgagtggtggctcccgggttggtggattgctacattaaccttggagcgcgttggtcattggactacatggacaacgtcaacccctttaaccatcaccgcaatgcgggcctacgctaccgctccatgttgctgggcaacggtcgctacgtgccctttcacatccaggttcctcagaagttttttgccattaagaacctcctactcttgccgggctcatacacctacgagtggaacttcaggaaagatgttaacatggtcctgcaaagctccctaggaaacgacctaagagttgacggagccagcattaagtttgacagcatttgcctctacgccaccttttttccgatggcccacaacaccgcctcaacgcttgaagccatgcttagaaacgacaccaacgaccagtcctttaacgactacctatccgccgccaacatgctttaccccatacccgccaacgccaccaacgtgcccatctctatcccctcgcgcaactgggcggctttccgaggctgggcctttacgcgccttaagactaaggaaaccccatccctgggttccggctacgacccttactatacctactctggctccataccctacctagacggaaccttttaccttaatcacaccttcaaaaaggtagccatcacctttgactcttctgttagctggcctggcaatgaccgtctgcttacccccaacgagtttgagatcaagcgttcagttgacggagagggctacaacgttgcccaatgcaacatgaccaaagactggttcttggtacagatgctagccaactacaacataggctaccagggcttttatatcccagaaagctataaggaccgcatgtactccttctttagaaacttccagcccatgagccgtcaggtggtggacgataccaaatacaaggactaccaacaggtgggcatcctccaccagcacaataactctggctttgttggttacctcgctcccaccatgcgagagggacaggcctaccccgccaacttcccctacccgcttataggcaagaccgcggttgacagtattacccagaaaaagtttctttgcgaccgcaccctttggcgcattccattctccagtaactttatgtccatgggtgcactcacagacctgggccaaaaccttctctatgcaaactccgcccacgcgctagatatgacttttgaggtggatcccatggacgagcccacccttctttatgttttgtttgaagtctttgacgtggtccgtgtgcaccagccgcaccgcggcgtcatcgagaccgtgtacctgcgcacgcccttctcggctggcaacgccacaacataaagaagcaagcaacatcaacaacagctgccgccatgggctccagtgagcaggaactaaaagccattgtcaaagatcttggttgtggaccatattttttgggcacctatgacaagcgcttcccaggctttgtttccccacacaagctcgcctgcgccatagttaacacggccggtcgcgagactgggggtgtacactggatggcctttgcctggaacccgcgctcaaaaacatgctacctctttgagccctttggcttttctgaccaacgtctcaagcaggtttaccagtttgagtacgagtcactcctgcgccgtagcgccattgcctcttcccccgaccgctgtataacgctggaaaagtccacccaaagcgtgcaggggcccaactcggccgcctgtggcctattctgctgcatgtttctccacgcctttgccaactggccccaaactcccatggatcacaaccccaccatgaaccttattacaggggtacccaactccatgcttaacagtccccaggtacagcccaccctgcgccgcaaccaggaacagctctacagcttcctggagcgccactcgccctacttccgcagccacagtgcgcaaattaggagcgccacttctttttgtcacttgaaaaacatgtaaaaataatgtactaggagacactttcaataaaggcaaatgtttttatttgtacactcttgggtgattatttaccccccacccttgccgtctgcgccgtttaaaaatcaaaggggttctgccgcgcatcgctatgcgccactggcagggacacgttgcgatactggtgtttagtgctccacttaaactcaggcacaaccatccgcggcagctcggtgaagttttcactccacaggctgcgcaccatcaccaacgcgtttagcaggtcgggccccgatatcttgaagtcgcagttggggcctccgccctgcgcgcgcgagttgcgatacacagggttgcagcactggaacactatcagcgccgggtgatgcacgctggccagcacgctcttgtcggagatcagatccgcgtccaggtcctccgcgttgctcagggcgaacggagtcaactttggtagctgccttcccaaaaagggtgcatgcccaggctttgagttgcactcgcaccgtagtggcatcagaaggtgaccgtgcccggtctgggcgttaggatacagcgccttcataaaggcctggatctgcttaaaagccacctgggcctttgcgccttcggaaaaaaacatgccgcaagacttgccggaaaactgattcgccggacaggccgcgtcgtgcacgcagcacctcgcgtcggtgttggagatctgtaccacgcttcggccccaacggttcttcacaatcttggccttgctagactgctccttcagcgcgcgctgcccgttttcgctcgtcacatccatttcaatcacgtgctccttgtttatcataatgctcccgtgtagacacttaagctcgccttcgatctcagcgcagcggtgcagccacaacgcgcagcccgtgggctcgtggtgcttgtaggtcacctctgcaaacgactgcaggtacgcttgcaggaatcgccccatcatcgtcacaaaggtcttgttgctggtaaaggtcagctgcaacccgcggtgctcctcgttcagccaggtcttacatacggccgccagggcttccacttggtcaggcagtagcttgaagttcgcctttagatcgttatccacgtgatacttgtccatcagcgcgcgcgcagcctccatgcccttctcccacgcagacacgatcggcagactcagcgggttcattaccgtgctttcactttccgcttcgctgggctcttcctcttcctcttgcatccgcataccccgcgccactgggtcgtcttcattcagccgccgcaccgtgcgcttacctcccttgccgtgcttaattagcaccggtgggttgctgaaacccaccatttgtagcgccacatcttctctttcttcctcgctgtccacaatcacctctggggatggcgggcgctcgggcttgggagatgggcgcttctttttcttcttgggcgcgttggccaaatccgccgccgaggttgatggccgcgggctgggtgtgcgcggcaccagcgcgtcttgtgacgagtcttcttcgtcctcggactcgagacgccgcctcagccgcttttttgggggcgcgcggggaggcggcggcgacggcgacggggacgacacgtcctccatggttggtggacgtcgcgccgcaccgcgtccgcgctcgggggtggtttcgcgctgctcctcttcccgactggccatttccttctcctataggcagaaaaagatcatggagtcagtcgagaaggaggacagcctaaccgccccctctgagttcgccaccaccgcctccaccgatgccgccaacgcgcctaccaccttccccgtcgaggcacccccgcttgaggaggaggaagtgactatcgagcaggacccaggttttgtaagcgaagacgacgaggaccgctcagtaccaacagaggataaaaagcaagaccaggacgacgcagaggcaaacaaggagcaagtcgggcggggggacgagaggcatggcgactacctagatgtgggagacgacgtgctgttgaagcatctgcagcgccagtgcgctattatctgcgacgcgttgcaagagcgcagcgatgtgcccctcgccatagcggatgttagccttgcctacgaacgccacctgttctcaccgcgtgtaccccccaaacgacaagaaaacggcacatgcgagcccaacccgcgcctcaacttctaccccgtatttgccgtgccagaggtgcttgccacctatcacatctttttccaaaactgcaagatacccctatcctgccgtgccaaccgcagccgagcggacaagcagctggccttgcggcagggcgctgtcatacctgatatcgcctcgctcgacgaagtgccaaaaatctttgagggtcttggacgcgacgagaagcgcgcggcaaacgctctgcaacaagaaaacagcgaaaatgaaagtcattgtggagtgctggtggaacttgagggtgacaacgcgcgcctagccgtgctaaaacgcagcatcgaggtcacccactttgcctacccggcacttaacctaccccccaaggttatgagcacagtcatgagcgagctgattgtgcgccgtgcacaacccctggagagggatgcaaacttgcaagaacaaaccgaggagggcctacccgcagttggcgatgagcagctggcgcgctggcttgagacgcgcgagcctgccgacttggaggagcgacgcaagctaatgatggccgcagtgcttgttaccgtggagcttgagtgcatgcagcggttctttactgacccgaagatgcagcgcaagctagaggaaacattgcactacacctttcgccagggctacgtgcgccaggcctgcaaaatttccaacgtggagctctgcaacctggtctcctaccttggaattttgcacgaaaaccgcctcgggcaaaacgtgcttcattccacgctcaagggcgaggcgcgccgcgactacgtccgcgactgcgtttacttatttctatgctacacctggcaaacggccatgggcgtgtggcagcagtgcctggaggagcgcaacctgaaggagctgcagaagctgctaaagcaaaacttgaaggacctatggacggccttcaacgagcgctccgtggccgcgcacctggcggacattatcttccccgaacgcctgcttaaaaccctgcaacagggtctgccagacttcaccagtcaaagcatgttgcaaaactttaggaactttatcctagagcgttcaggaatcctgcccgccacctgctgtgcgcttcctagcgactttgtgcccattaagtaccgtgaatgccctccgccgctttggggtcactgctaccttctgcagctagccaactaccttgcctaccactccgacatcatggaagacgtgagcggtgacggcctactggagtgtcactgtcgctgcaacctatgcaccccgcaccgctccctggtctgcaattcgcagctgcttagcgagagtcaaattatcggtacctttgagctgcagggtccctcgcctgacgaaaagtccgcggctccggggttgaaactcactccggggctgtggacgtcggcttaccttcgcaaatttgtacctgaggactaccacgcccacgagattaggttctacgaagaccaatcccgcccgcccaatgcggagcttaccgcctgcgtcattacccagggccacatccttggccaattgcaagccatcaacaaagcccgccaagagtttctgctacgaaagggacggggggtttacttggacccccagtccggcgaggagctcaacccaattcccccgccgccgcagccctatcagcagcagccgcgggcccttgcttcccaggatggcacccaaaaagaagctgcagctgccgccgccacccacggacgaggaggaatactgggacagtcaggcagaggaggttttggacgaggaggaggaggacatgatggaagactgggagagcctagacgaggaagcttccgaggccgaagaggtgtcagacgaaacaccgtcaccctcggtcgcattcccctcgccggcgccccagaaatcggcaaccggtccaagcatggctacaacctccgctcctcaggcgccgccggcactgcccgttcgccgacccaaccgtagatgggacaccactggaaccagggccggtaagtccaagcagccgccgccgttagcccaagagcaacaacagcgccaaggctaccgctcgtggcgcgggcacaagaacgccatagttgcttgcttgcaagactgtgggggcaacatctccttcgcccgccgctttcttctctaccatcacggcgtggccttcccccgtaacatcctgcattactaccgtcatctctacagcccctactgcaccggcggcagcggcagcaacagcagcggccacacagaagcaaaggcgaccggatagcaagactctgacaaagcccaagaaatccacagcggcggcagcagcaggaggaggagcgctgcgtctggcgcccaacgaacccgtatcgacccgcgagcttagaaacaggatttttcccactctgtatgctatatttcaacagagcaggggccaagaacaagagctaaaaataaaaaacaggtctctgcgatccctcacccgcagctgcctgtatcacaaaagcgaagatcagcttcggcgcacgctggaagacgcggaggctctcttcagtaaatactgcgcgctgactcttaaggactagtttcgcgccctttctcaaatttaagcgcgaaaactacgtcatctccagcggccacacccggcgccagcacctgtcgtcagcgccactatgagcaaggaaattcccacgccctacatgtggagttaccagccacaaatgggacttgcggctggagctgcccaagactactcaacccgaataaactacatgagcgcgggaccccacatgatatcccgggtcaacggaatacgcgcccaccgaaaccgaattctcctggaacaggcggctattaccaccacacctcgtaataaccttaatccccgtagttggcccgctgccctggtgtaccaggaaagtcccgctcccaccactgtggtacttcccagagacgcccaggccgaagttcagatgactaactcaggggcgcagcttgcgggcggctttcgtcacagggtgcggtcgcccgggcagggtataactcacctgaaaatcagagggcgaggtattcagctcaacgacgagtcggtgagctcctcgcttggtctccgtccggacgggacatttcagatcggcggtgccggccgctcttcatttacgccccgtcaggcgatcttaactctgcaaacctcatcctcggagccgcgctccggaggcattggaactctacaatttattgaggagttcgtgccttcggtttacttcaaccccttttctggacctcctggccactacccggaccagtttattcccaactttgacgcggtgaaggactcggcggacggctacgactgaatgactagtggagaggcagagcaactgcgcctaacacaccttgaccactgccgccgccacaagtgctttgcccgcggctccggtgagttttgttactttgagttgcccgaagagcatatcgagggcccggcgcacggcgtccggctcaccacccaggtagagcttactcgtagcctaattcgggagtttaccctgcgccccctgctagtggagcgggagaggggtccctgtgttctgaccgtggtttgcaactgtcctaaccctggattacatcaagatctttgttgccatctctgtactgagtataataaatacagaaattagaatctactggggctcctgtcgctcctgtaaacgccaccgtcttcacccacccaaacctgcgatttgcacaggcgggccaaaaagtaccttgccggtacttaacggctcttcctttgtgatttacaacagtttcaaccaagacggagtgagccgcggacaacctctccgggcttatcagaaaaaatcaccctccttacctgccgggaacgtaccagtgcgtcaccggtcgccgcacccaccgcctgattgttaaccaacatttccagcaacagacctcaataattcccattttccataagaggaggtgagcttaaccccctggaagcgcatttttactgtttttaggcaaggtgtatgaactctactaactctacgggcttctctgcttcaggtaatttttctggaatcgggctcggggtcattctcactcttgtaattctctttatttttatactagcgcttctgtgtcttaggcttgccgcctgctgcgcacacgtttgcatttactgtcagcttattaaacgctggggacgccacccaagatgattaaatacatcattttaagcttgcttaccctagcggcagtctgcagtgctgccaaacaggtagagtttaaggagccagcttgcaatgttacatttaaatccgaagctaatgaatgcaccactcttataaaatgcaccacagaacatgaaaagcttattattcgccacaaagacaaagctggcaagtatgctgtatatgctatttggcagcctggagaccctaacaactataatgttacagtttttcagggtaatgattctaaagtttttttgtatgaatttccattttatgaaatgtgtgacattaccatgtacatgagcaaacagtataagttgtggcccccacaaaagtgtgtggagaacactggcactttttgctttactgctctcctgattacagtgattactttggtgtgtaccctcctttatattaaatttaaaagcagacgcagctttattgaagaaaagaaaatgccttagcatgctgccgccgcttcttgcttgcattgcaaaacagcttacaaccttagcattataatagcatgtcttgcaacgcccccctcaaagctccccactttaccctgcttaatgtcattcccatggacaatggactctgtggaatatgtgccaggttggcaaggcaagacacacgcctacaaccttaaagtcaggctttcctggactgagagcgcctgacttcaacagcacctgccccgtggagttcatccagcaacttcagcagcccgccttcgacatggtcgacacagtgaactcttacaacaccgctaccggactcacatctacccaagatatgccccaagtttctacctttgttaataattgggcaaacttgggcatgtggtggttttcaatagcgcttatgtttgtctgccttattattatgtggctttcctgctgcctaaagcgcaaacgcgcccgaccacccatttataagcccattattgtgcttaacccaaacaatgatggaatacatagattggacgggctgaacacttgttctttttcttttgcagtatgattaaatgagacatgattcctcgagtttttatattattgacccttattgcgcttttctgcgcgtgctccacattggccgcggttgctaacatcgaagtagactgcattccagccttcacagtctacctgctttacggatttgtcacccttacgctcatctgcagcctcatcactgtagtgatcgcctttattcaatgcattgactgggtctgtgtgcgcattgcataccttagacaccatcctcaatacagagacacggccatagctgagcttcttagaattctttaattatgaaaattacttggattttcttactaattttttacaccttaactgtggtttgctcccagacctccaagcctccccaaagacatgtatcttgcagatttactcgtatatggaacattccaagttgctacactgaaaaaagcgacctgtccgaaacctggttgtatgccatcatctcggtttttgtattttgtagcaccataattgcactagccatatacccctacctggatattggatggaacgccatagacgccatgagccattccactttccccgcgcccgctataattcagatgcagccaattgttgccggcggcattgtcccagccaatcagcatcgccctccttctcccactcccactgagattagctactttaatctaacaggcggagatgactgacggcctagatctagaaatggacggaattattaccgagcagcgtctgctacagaggcgcaaagcagcggcagagcaggaacgcctaaatcaggagctccaagacatggttaacctgcaccagtgtaaaagaggtattttttgtctggttaagcaggcaaaagttacctacgagaaggaccacagcaaccaccgccttagctacaagctgcccgccaagcgccaaaaactgctgcttatggtgggagaaaggcccatcaccgtcactcagcagtcagtagaaactgagggctgtctgcacttcccctgccagggtccagaggacctttgcacccttattaagactttatgcggtcttagagatcttattccctttaactaataaacaatacaataaatgtaatcaataaagaatcacttacttaaaatcacttagcagatctttatccaatttattcagcagcacctcctttccctcctcccaactctggtacctcagtcgtcttctagctgcaaactttctccacagtttaaatgggatgtcagattcctcttgttcctgcccctccgcacccactattttcatgttgttgcagatgaagcgcgccagaccgtctgaagacaccttcaaccccgtgtacccttatgacacggaaaccggccccccaacagtgcctttccttacccctccctttgtctcccccaatgggttccaagaaagtccccctggggtgctttctctgcgcctttccgaaccactcgtcacctcccacggcatgcttgcgctcaaaatgggcagcggcctagccctggacaaggccggcaaccttacatcacaaaatataaccaccgtcactgagccattaaaaaaaacaaagtccaacataagcctggaaacctccgcgcccctcacagttacatcaggcattcttaccgtagccactgccgcacctttggtggtcgcgggcaacagtcttaccgtgcagtcacaggccccgttaaccgtgcaagactctaaacttagcattgccaccaaaggacccctcacagtgtcagaaggaaagctggccctgcaaacatcgggccccctttctgccactgataacaacacccttactattactacttcaccccctataactactacaaatggtagtttgggtgttaacatggaaaacccactttacaacaacaatggcaaactggggctcagagttgcaggtcctttgcaagtgaccaacgactctcacgcactaacagtaggtacaggtcagggtgttgccattgataataatgcgctacacacaaaagttacaggcgcaatagggtatgatacatctggtaacatggaacttaaaactggagggggagtgcgtgtagacagtgtaaataggcgtcttatactcgatgttgattatccatttgatgcccaaagccaactacgcctaaaactaggacagggacccctatatgtaaactcaagcacacacaacttggatttaaactacaataaaggccttcacttgtttacaactggaaactctaaaaagctagaagtaaatcttaaaacaacaaagggtcttatttttgacaccgatgctgttgcaatacatgcagcacaaggtctagaatttggtaatgatacgtcaacaaatacaaacccacttaaaacaaaactaggattgggattggactatgactcaaacggtggtatgattcccaaacttggaacaggccttagttttgatactacaggggctataacagtgggaaacaaaagcgatgacaaacttaccctgtggacaactcctgacccatcacctaattgtcaaatacactcagaaaaagatgctaagctaacactagttttaactaaatgcggcagtcaggtacttgcaactgtgtcagcactggctgtaaggggcagcctagctcctattagcggaacaataagtagtgctcacattattctcagatttaatgaacatggagtgctaatgaatcattctagtttggatccccaatactggaatttcagaaaaggggatttaacaaacgctacagcatatactaacgcagttggttttatgcccaaccttaaagcttacccaaaaactcaaagtagaactgcaaaaagcaacattgttagtcaggtttatcttaatggagaaaaagaaaaaccaatgacactcactattacacttaatggaactgatgaaaatcaaaccactcccgccagtacatactcaatttcattttcatggagctggcctagcaatcaaacatacattggtcaaacatttgccactaattcctacaccttctcctacattgcccaagaataaagaatcgttgtgttatgtttcaacgtgtttatttttcaattgcaaaaaatttcaagtcatttttcattcagtagtatagccccaccaccacatagcttatattgatcaccgtaccttaatcaaactcacagaaccctagtattcaacctgccacctccctcccaacacacagagtacacagtcctttctccccggctggccttaaaaagcatcatatcatgggtaacagacatattcttaggtgttatattccacacggtttcctgtcgagccaaacgctcatcagtgatattaataaactccccgggcagctctcttaagttcatgttgctgtccagctgctgagccacaggctgctgtccaacttgcggttgctcaacgggcggcgaaggggaagtccacgcctacatgggggtagagtcataatcgtgcatcaggatagggcggtggtgctgcagcagcgcgcgaataaactgctgccgccgccgctccgtcctgcaggaatacaacatggcagtggtctcctcagcgatgattcgcaccgcccgcagcataagacgccttgtcctccgggcacagcagcgcaccctgatctcacttaaatcagcacagtaactgcagcacagcaccacaatattgttcaaaatcccacagtgcaaggcgctgtatccaaagctcatggcggggaccacagaacccacgtggccatcataccacaagcgcaggtagattaagtggcgacccctcataaacacgctggacataaacattacctcttttggcatgttgtaattcaccacctcccggtaccatataaacctctgattaaacatggcgccatccaccaccatcctaaaccagctggccaaaacctgcccgccggctatgcactgcaaggaaccgggactggaacaatgacagtggagagcccaggactcgtaaccatggatcatcatgctcgtcatgatatcaatgttggcacaacacaggcacacgtgcatacacttcctcaggattacaagctcctcccgcgtcagaaccatatcccagggaacaacccattcctgaatcagcgtaaatcccacactgcagggaagacctcgcacgtaactcacgttgtgcattgtcaaagtgttacattcgggcagcagcggatgatcctccagtatggtagcgcgggtctctgtctcaaaaggaggtaggcgatccctactgtacggagtgcgccgagacaaccgagatcgtgttggtcgtagtgtcatgccaaatggaacgccggacgtagtcatatttcctgaagcaaaaccaggtgcgggcgtgacaaacagatctgcgtctccggtctcgtcgcttagctcgctctgtgtagtagttgtagtatatccactctctcaaagcatccaggcgccccctggcttcgggttctatgtaaactccttcatgcgccgctgccctgataacatccaccaccgcagaataagccacacccagccaacctacacattcgttctgcgagtcacacacgggaggagcgggaagagctggaagaaccatgttttttttttttttattccaaaagattatccaaaacctcaaaatgaagatctattaagtgaacgcgctcccctccggtggcgtggtcaaactctacagccaaagaacagataatggcatttgtaagatgttgcacaatggcttccaaaaggcaaactgccctcacgtccaagtggacgtaaaggctaaacccttcagggtgaatctcctctataaacattccagcaccttcaaccatgcccaaataattttcatctcgccaccttatcaatatgtctctaagtaaatcccgaatattaagtccggccattgtaaaaatctgctccagagcaccctccaccttcagcctcaagcagcgaatcatgattgcaaaaattcaggttcctcacagacctgtataagattcaaaagcggaacattaacaaaaataccgcgatcccgtaggtcccttcgcagggccagctgaacataatcgtgcaggtctgcacggaccagcgcggccacttccccgccaggaaccatgacaaaagaacccacactgattatgacacgcatactcggagctatgctaaccagcgtagccccgatgtaagcttgttgcatgggcggcgatataaaatgcaaggtgctgctcaaaaaatcaggcaaagcctcgcgcaaaaaagcaagcacatcgtagtcatgctcatgcagataaaggcaggtaagttccggaaccaccacagaaaaagacaccatttttctctcaaacatgtctgcgggttcctgcataaacacaaaataaaataacaaaaaaaaaaacatttaaacattagaagcctgtcttacaacaggaaaaacaacccttataagcataagacggactacggccatgccggcgtgaccgtaaaaaaactggtcaccgtgattaaaaagcaccaccgacagttcctcggtcatgtccggagtcataatgtaagactcggtaaacacatcaggttggttaacatcggtcagtgctaaaaagcgaccgaaatagcccgggggaatacatacccgcaggcgtagagacaacattacagcccccataggaggtataacaaaattaataggagagaaaaacacataaacacctgaaaaaccctcctgcctaggcaaaatagcaccctcccgctccagaacaacatacagcgcttccacagcggcagccataacagtcagccttaccagtaaaaaaacctattaaaaaacaccactcgacacggcaccagctcaatcagtcacagtgtaaaaagggccaagtacagagcgagtatatataggactaaaaaatgacgtaacggttaaagtccacaaaaaacacccagaaaaccgcacgcgaacctacgcccagaaacgaaagccaaaaaacccacaacttcctcaaatcttcacttccgttttcccacgatacgtcacttcccattttaaaaaaaactacaattcccaatacatgcaagttactccgccctaaaacctacgtcacccgccccgttcccacgccccgcgccacgtcacaaactccaccccctcattatcatattggcttcaatccaaaataaggtatattattgatgatgatttaaa

SEQ ID NO: 15 - DNA, 35952 bp, Adenovirus C2
  MISC_FEATURE (1)..(35952): Complete Genome
tttaaatcatcatcaataatataccttattttggattgaagccaatatgataatgagggggtggagtttgtgacgtggcgcggggcgtgggaacggggcgggtgacgtagtagtgtggcggaagtgtgatgttgcaagtgtggcggaacacatgtaagcgccggatgtggtaaaagtgacgtttttggtgtgcgccggtgtatacgggaagtgacaattttcgcgcggttttaggcggatgttgtagtaaatttgggcgtaaccaagtaatatttggccattttcgcgggaaaactgaataagaggaagtgaaatctgaataattctgtgttactcatagcgcgtaatatttgtctagggccgcggggactttgaccgtttacgtggagactcgcccaggtgtttttctcaggtgttttccgcgttccgggtcaaagttggcgttttattattatagtcagctgacgcgcagtgtatttatacccggtgagttcctcaagaggccactcttgagtgccagcgagtagagttttctcctccgagccgctccgacaccgggactgaaaatgagacatattatctgccacggaggtgttattaccgaagaaatggccgccagtcttttggaccagctgatcgaagaggtactggctgataatcttccacctcctagccattttgaaccacctacccttcacgaactgtatgatttagacgtgacggcccccgaagatcccaacgaggaggcggtttcgcagatttttcccgagtctgtaatgttggcggtgcaggaagggattgacttattcacttttccgccggcgcccggttctccggagccgcctcacctttcccggcagcccgagcagccggagcagagagccttgggtccggtttctatgccaaaccttgtgccggaggtgatcgatcttacctgccacgaggctggctttccacccagtgacgacgaggatgaagagggtgaggagtttgtgttagattatgtggagcaccccgggcacggttgcaggtcttgtcattatcaccggaggaatacgggggacccagatattatgtgttcgctttgctatatgaggacctgtggcatgtttgtctacagtaagtgaaaattatgggcagtgggtgatagagtggtgggtttggtgtggtaatttttttttaatttttacagttttgtggtttaaagaattttgtattgtgattttttaaaaggtcctgtgtctgaacctgagcctgagcccgagccagaaccggagcctgcaagacctacccggcgtcctaaattggtgcctgctatcctgagacgcccgacatcacctgtgtctagagaatgcaatagtagtacggatagctgtgactccggtccttctaacacacctcctgagatacacccggtggtcccgctgtgccccattaaaccagttgccgtgagagttggtgggcgtcgccaggctgtggaatgtatcgaggacttgcttaacgagtctgggcaacctttggacttgagctgtaaacgccccaggccataaggtgtaaacctgtgattgcgtgtgtggttaacgcctttgtttgctgaatgagttgatgtaagtttaataaagggtgagataatgtttaacttgcatggcgtgttaaatggggcggggcttaaagggtatataatgcgccgtgggctaatcttggttacatctgacctcatggaggcttgggagtgtttggaagatttttctgctgtgcgtaacttgctggaacagagctctaacagtacctcttggttttggaggtttctgtggggctcctcccaggcaaagttagtctgcagaattaaggaggattacaagtgggaatttgaagagcttttgaaatcctgtggtgagctgtttgattctttgaatctgggtcaccaggcgcttttccaagagaaggtcatcaagactttggatttttccacaccggggcgcgctgcggctgctgttgcttttttgagttttataaaggataaatggagcgaagaaacccatctgagcggggggtacctgctggattttctggccatgcatctgtggagagcggtggtgagacacaagaatcgcctgctactgttgtcttccgtccgcccggcaataataccgacggaggagcaacagcaggaggaagccaggcggcggcggcggcaggagcagagcccatggaacccgagagccggcctggaccctcgggaatgaatgttgtacaggtggctgaactgtttccagaactgagacgcattttaaccattaacgaggatgggcaggggctaaagggggtaaagagggagcggggggcttctgaggctacagaggaggctaggaatctaacttttagcttaatgaccagacaccgtcctgagtgtgttacttttcagcagattaaggataattgcgctaatgagcttgatctgctggcgcagaagtattccatagagcagctgaccacttactggctgcagccaggggatgattttgaggaggctattagggtatatgcaaaggtggcacttaggccagattgcaagtacaagattagcaaacttgtaaatatcaggaattgttgctacatttctgggaacggggccgaggtggagatagatacggaggatagggtggcctttagatgtagcatgataaatatgtggccgggggtgcttggcatggacggggtggttattatgaatgtgaggtttactggtcccaattttagcggtacggttttcctggccaataccaatcttatcctacacggtgtaagcttctatgggtttaacaatacctgtgtggaagcctggaccgatgtaagggttcggggctgtgccttttactgctgctggaagggggtggtgtgtcgccccaaaagcagggcttcaattaagaaatgcctgtttgaaaggtgtaccttgggtatcctgtctgagggtaactccagggtgcgccacaatgtggcctccgactgtggttgcttcatgctagtgaaaagcgtggctgtgattaagcataacatggtgtgtggcaactgcgaggacagggcctctcagatgctgacctgctcggacggcaactgtcacttgctgaagaccattcacgtagccagccactctcgcaaggcctggccagtgtttgagcacaacatactgacccgctgttccttgcatttgggtaacaggaggggggtgttcctaccttaccaatgcaatttgagtcacactaagatattgcttgagcccgagagcatgtccaaggtgaacctgaacggggtgtttgacatgaccatgaagatctggaaggtgctgaggtacgatgagacccgcaccaggtgcagaccctgcgagtgtggcggtaaacatattaggaaccagcctgtgatgctggatgtgaccgaggagctgaggcccgatcacttggtgctggcctgcacccgcgctgagtttggctctagcgatgaagatacagattgaggtactgaaatgtgtgggcgtggcttaagggtgggaaagaatatataaggtgggggtctcatgtagttttgtatctgttttgcagcagccgccgccatgagcgccaactcgtttgatggaagcattgtgagctcatatttgacaacgcgcatgcccccatgggccggggtgcgtcagaatgtgatgggctccagcattgatggtcgccccgtcctgcccgcaaactctactaccttgacctacgagaccgtgtctggaacgccgttggagactgcagcctccgccgccgcttcagccgctgcagccaccgcccgcgggattgtgactgactttgctttcctgagcccgcttgcaagcagtgcagcttcccgttcatccgcccgcgatgacaagttgacggctcttttggcacaattggattctttgacccgggaacttaatgtcgtttctcagcagctgttggatctgcgccagcaggtttctgccctgaaggcttcctcccctcccaatgcggtttaaaacataaataaaaaccagactctgtttggattttgatcaagcaagtgtcttgctgtctttatttaggggttttgcgcgcgcggtaggcccgggaccagcggtctcggtcgttgagggtcctgtgtattttttccaggacgtggtaaaggtgactctggatgttcagatacatgggcataagcccgtctctggggtggaggtagcaccactgcagagcttcatgctgcggggtggtgttgtagatgatccagtcgtagcaggagcgctgggcgtggtgcctaaaaatgtctttcagtagcaagctgattgccaggggcaggcccttggtgtaagtgtttacaaagcggttaagctgggatgggtgcatacgtggggatatgagatgcatcttggactgtatttttaggttggctatgttcccagccatatccctccggggattcatgttgtgcagaaccaccagcacagtgtatccggtgcacttgggaaatttgtcatgtagcttagaaggaaatgcgtggaagaacttggagacgcccttgtgacctccaagattttccatgcattcgtccataatgatggcaatgggcccacgggcggcggcctgggcgaagatatttctgggatcactaacgtcatagttgtgttccaggatgagatcgtcataggccatttttacaaagcgcgggcggagggtgccagactgcggtataatggttccatccggcccaggggcgtagttaccctcacagatttgcatttcccacgctttgagttcagatggggggatcatgtctacctgcggggcgatgaagaaaaccgtttccggggtaggggagatcagctgggaagaaagcaggttcctgagcagctgcgacttaccgcagccggtgggcccgtaaatcacacctattaccggctgcaactggtagttaagagagctgcagctgccgtcatccctgagcaggggggccacttcgttaagcatgtccctgacttgcatgttttccctgaccaaatccgccagaaggcgctcgccgcccagcgatagcagttcttgcaaggaagcaaagtttttcaacggtttgaggccgtccgccgtaggcatgcttttgagcgtttgaccaagcagttccaggcggtcccacagctcggtcacgtgctctacggcatctcgatccagcatatctcctcgtttcgcgggttggggcggctttcgctgtacggcagtagtcggtgctcgtccagacgggccagggtcatgtctttccacgggcgcagggtcctcgtcagcgtagtctgggtcacggtgaaggggtgcgctccgggctgcgcgctggccagggtgcgcttgaggctggtcctgctggtgctgaagcgctgccggtcttcgccctgcgcgtcggccaggtagcatttgaccatggtgtcatagtccagcccctccgcggcgtggcccttggcgcgcagcttgcccttggaggaggcgccgcacgaggggcagtgcagacttttaagggcgtagagcttgggcgcgagaaataccgattccggggagtaggcatccgcgccgcaggccccgcagacggtctcgcattccacgagccaggtgagctctggccgttcggggtcaaaaaccaggtttcccccatgctttttgatgcgtttcttacctctggtttccatgagccggtgtccacgctcggtgacgaaaaggctgtccgtgtccccgtatacagacttgagaggcctgtcctcgagcggtgttccgcggtcctcctcgtatagaaactcggaccactctgagacgaaggctcgcgtccaggccagcacgaaggaggctaagtgggaggggtagcggtcgttgtccactagggggtccactcgctccagggtgtgaagacacatgtcgccctcttcggcatcaaggaaggtgattggtttataggtgtaggccacgtgaccgggtgttcctgaaggggggctataaaagggggtgggggcgcgttcgtcctcactctcttccgcatcgctgtctgcgagggccagctgttggggtgagtactccctctcaaaagcgggcatgacttctgcgctaagattgtcagtttccaaaaacgaggaggatttgatattcacctggcccgcggtgatgcctttgagggtggccgcgtccatctggtcagaaaagacaatctttttgttgtcaagcttggtggcaaacgacccgtagagggcgttggacagcaacttggcgatggagcgcagggtttggtttttgtcgcgatcggcgcgctccttggccgcgatgtttagctgcacgtattcgcgcgcaacgcaccgccattcgggaaagacggtggtgcgctcgtcgggcaccaggtgcacgcgccaaccgcggttgtgcagggtgacaaggtcaacgctggtggctacctctccgcgtaggcgctcgttggtccagcagaggcggccgcccttgcgcgaacagaatggcggtagtgggtctagctgcgtctcgtccggggggtctgcgtccacggtaaagaccccgggcagcaggcgcgcgtcgaagtagtctatcttgcatccttgcaagtctagcgcctgctgccatgcgcgggcggcaagcgcgcgctcgtatgggttgagtgggggaccccatggcatggggtgggtgagcgcggaggcgtacatgccgcaaatgtcgtaaacgtagaggggctctctgagtattccaagatatgtagggtagcatcttccaccgcggatgctggcgcgcacgtaatcgtatagttcgtgcgagggagcgaggaggtcgggaccgaggttgctacgggcgggctgctctgctcggaagactatctgcctgaagatggcatgtgagttggatgatatggttggacgctggaagacgttgaagctggcgtctgtgagacctaccgcgtcacgcacgaaggaggcgtaggagtcgcgcagcttgttgaccagctcggcggtgacctgcacgtctagggcgcagtagtccagggtttccttgatgatgtcatacttatcctgtcccttttttttccacagctcgcggttgaggacaaactcttcgcggtctttccagtactcttggatcggaaacccgtcggcctccgaacggtaagagcctagcatgtagaactggttgacggcctggtaggcgcagcatcccttttctacgggtagcgcgtatgcctgcgcggccttccggagcgaggtgtgggtgagcgcaaaggtgtccctaaccatgactttgaggtactggtatttgaagtcagtgtcgtcgcatccgccctgctcccagagcaaaaagtccgtgcgctttttggaacgcgggtttggcagggcgaaggtgacatcgttgaaaagtatctttcccgcgcgaggcataaagttgcgtgtgatgcggaagggtcccggcacctcggaacggttgttaattacctgggcggcgagcacgatctcgtcgaagccgttgatgttgtggcccacgatgtaaagttccaagaagcgcggggtgcccttgatggagggcaattttttaagttcctcgtaggtgagctcctcaggggagctgagcccgtgttctgacagggcccagtctgcaagatgagggttggaagcgacgaatgagctccacaggtcacgggccattagcatttgcaggtggtcgcgaaaggtcctaaactggcgacctatggccattttttctggggtgatgcagtagaaggtaagcgggtcttgttcccagcggtcccatccaaggtccacggctaggtctcgcgcggcggtcaccagaggctcatctccgccgaacttcataaccagcatgaagggcacgagctgcttcccaaaggcccccatccaagtataggtctctacatcgtaggtgacaaagagacgctcggtgcgaggatgcgagccgatcgggaagaactggatctcccgccaccagttggaggagtggctgttgatgtggtgaaagtagaagtccctgcgacgggccgaacactcgtgctggcttttgtaaaaacgtgcgcagtactggcagcggtgcacgggctgtacatcctgcacgaggttgacctgacgaccgcgcacaaggaagcagagtgggaatttgagcccctcgcctggcgggtttggctggtggtcttctacttcggctgcttgtccttgaccgtctggctgctcgaggggagttatggtggatcggaccaccacgccgcgcgagcccaaagtccagatgtccgcgcgcggcggtcggagcttgatgacaacatcgcgcagatgggagctgtccatggtctggagctcccgcggcgacaggtcaggcgggagctcctgcaggtttacctcgcatagccgggtcagggcgcgggctaggtccaggtgatacctgatttccaggggctggttggtggcggcgtcgatgacttgcaagaggccgcatccccgcggcgcgactacggtaccgcgcggcgggcggtgggccgcgggggtgtccttggatgatgcatctaaaagcggtgacgcgggcgggcccccggaggtagggggggctcgggacccgccgggagagggggcaggggcacgtcggcgccgcgcgcgggcaggagctggtgctgcgcgcggaggttgctggcgaacgcgacgacgcggcggttgatctcctgaatctggcgcctctgcgtgaagacgacgggcccggtgagcttgaacctgaaagagagttcgacagaatcaatttcggtgtcgttgacggcggcctggcgcaaaatctcctgcacgtctcctgagttgtcttgataggcgatttcggccatgaactgctcgatctcttcctcctggagatctccgcgtccggctcgctccacggtggcggcgaggtcgttggagatgcgggccatgagctgcgagaaggcgttgaggcctccctcgttccagacgcggctgtagaccacgcccccttcggcatcgcgggcgcgcatgaccacctgcgcgagattgagctccacgtgccgggcgaagacggcgtagtttcgcaggcgctgaaagaggtagttgagggtggtggcggtgtgttctgccacgaagaagtacataacccagcgtcgcaacgtggattcgttgatatcccccaaggcctcaaggcgctccatggcctcgtagaagtccacggcgaagttgaaaaactgggagttgcgcgccgacacggttaactcctcctccagaagacggatgagctcggcgacagtgtcgcgcacctcgcgctcaaaggctacaggggcctcttcttcttcaatctcctcttccataagggcctccccttcttcttcttcttctggcggcggtgggggaggggggacacggcggcgacgacggcgcaccgggaggcggtcgacaaagcgctcgatcatctccccgcggcgacggcgcatggtctcggtgacggcgcggccgttctcgcgggggcgcagttggaagacgccgcccgtcatgtcccggttatgggttggcggggggctgccgtgcggcagggatacggcgctaacgatgcatctcaacaattgttgtgtaggtactccgccaccgagggacctgagcgagtccgcatcgaccggatcggaaaacctctcgagaaaggcgtctaaccagtcacagtcgcaaggtaggctgagcaccgtggcgggcggcagcgggtggcggtcggggttgtttctggcggaggtgctgctgatgatgtaattaaagtaggcggtcttgagacggcggatggtcgacagaagcaccatgtccttgggtccggcctgctgaatgcgcaggcggtcggccatgccccaggcttcgttttgacatcggcgcaggtctttgtagtagtcttgcatgagcctttctaccggcacttcttcttctccttcctcttgtcctgcatctcttgcatctatcgctacggcggcggcggagtttggccgtaggtggcgccctcttcctcccatgcgtgtgaccccgaagcccctcatcggctgaagcagggccaggtcggcgacaacgcgctcggctaatatggcctgctgcacctgcgtgagggtagactggaagtcatccatgtccacaaagcggtggtatgcgcccgtgttgatggtgtaagtgcagttggccataacggaccagttaacggtctggtgacccggctgcgagagctcggtgtacctgagacgcgagtaagcccttgagtcaaagacgtagtcgttgcaagtccgcaccaggtactgatatcccaccaaaaagtgcggcggcggctggcggtagaggggccagcgtagggtggccggggctccgggggcgaggtcttccaacataaggcgatgatatccgtagatgtacctggacatccaggtgatgccggcggcggtggtggaggcgcgcggaaagtcgcggacgcggttccagatgttgcgcagcggcaaaaagtgctccatggtcgggacgctctggccggtgaggcgtgcgcagtcgttgacgctctagaccgtgcaaaaggagagcctgtaagcgggcactcttccgtggtctggtggataaattcgcaagggtatcatggcggacgaccggggttcgaaccccggatccggccgtccgccgtgatccatgcggttaccgcccgcgtgtcgaacccaggtgtgcgacgtcagacaacgggggagcgctccttttggcttccttccaggcgcggcggctgctgcgctagcttttttggccactggccgcgcgcggcgtaagcggttaggctggaaagcgaaagcattaagtggctcgctccctgtagccggagggttattttccaagggttgagtcgcaggacccccggttcgagtctcgggccggccggactgcggcgaacgggggtttgcctccccgtcatgcaagaccccgcttgcaaattcctccggaaacagggacgagccccttttttgcttttcccagatgcatccggtgctgcggcagatgcgcccccctcctcagcagcggcaagagcaagagcagcggcagacatgcagggcaccctccccttctcctaccgcgtcaggaggggcaacatccgcggctgacgcggcggcagatggtgattacgaacccccgcggcgccgggcccggcactacctggacttggaggagggcgagggcctggcgcggctaggagcgccctctcctgagcgacacccaagggtgcagctgaagcgtgacacgcgcgaggcgtacgtgccgcggcagaacctgtttcgcgaccgcgagggagaggagcccgaggagatgcgggatcgaaagttccacgcagggcgcgagttgcggcatggcctgaaccgcgagcggttgctgcgcgaggaggactttgagcccgacgcgcggaccgggattagtcccgcgcgcgcacacgtggcggccgccgacctggtaaccgcgtacgagcagacggtgaaccaggagattaactttcaaaaaagctttaacaaccacgtgcgcacgcttgtggcgcgcgaggaggtggctataggactgatgcatctgtgggactttgtaagcgcgctggagcaaaacccaaatagcaagccgctcatggcgcagctgttccttatagtgcagcacagcagggacaacgaggcattcagggatgcgctgctaaacatagtagagcccgagggccgctggctgctcgatttgataaacattctgcagagcatagtggtgcaggagcgcagcttgagcctggctgacaaggtggccgccattaactattccatgctcagtctgggcaagttttacgcccgcaagatataccataccccttacgttcccatagacaaggaggtaaagatcgaggggttctacatgcgcatggcgttgaaggtgcttaccttgagcgacgacctgggcgtttatcgcaacgagcgcatccacaaggccgtgagcgtgagccggcggcgcgagctcagcgaccgcgagctgatgcacagcctgcaaagggccctggctggcacgggcagcggcgatagagaggccgagtcctactttgacgcgggcgctgacctgcgctgggccccaagccgacgcgccctggaggcagctggggccggacctgggctggcggtggcacccgcgcgcgctggcaacgtcggcggcgtggaggaatatgacgaggacgatgagtacgagccagaggacggcgagtactaagcggtgatgtttctgatcagatgatgcaagacgcaacggacccggcggtgcgggcggcgctgcagagccagccgtccggccttaactccacggacgactggcgccaggtcatggaccgcatcatgtcgctgactgcgcgtaaccctgacgcgttccggcagcagccgcaggccaaccggctctccgcaattctggaagcggtggtcccggcgcgcgcaaaccccacgcacgagaaggtgctggcgatcgtaaacgcgctggccgaaaacagggccatccggcccgatgaggccggcctggtctacgacgcgctgcttcagcgcgtggctcgttacaacagcggcaacgtgcagaccaacctggaccggctggtgggggatgtgcgcgaggccgtggcgcagcgtgagcgcgcgcagcagcagggcaacctgggctccatggttgcactaaacgccttcctgagtacacagcccgccaacgtgccgcggggacaggaggactacaccaactttgtgagcgcactgcggctaatggtgactgagacaccgcaaagtgaggtgtaccagtccgggccagactattttttccagaccagtagacaaggcctgcagaccgtaaacctgagccaggctttcaagaacttgcaggggctgtggggggtgcgggctcccacaggcgaccgcgcgaccgtgtctagcttgctgacgcccaactcgcgcctgttgctgctgctaatagcgcccttcacggacagtggcagcgtgtcccgggacacatacctaggtcacttgctgacactgtaccgcgaggccataggtcaggcgcatgtggacgagcatactttccaggagattacaagtgtcagccgcgcgctggggcaggaggacacgggcagcctggaggcaaccctgaactacctgctgaccaaccggcggcagaagatcccctcgttgcacagtttaaacagcgaggaggagcgcatcttgcgctatgtgcagcagagcgtgagccttaacctgatgcgcgacggggtaacgcccagcgtggcgctggacatgaccgcgcgcaacatggaaccgggcatgtatgcctcaaaccggccgtttatcaatcgcctaatggactacttgcatcgcgcggccgccgtgaaccccgagtatttcaccaatgccatcttgaacccgcactggctaccgccccctggtttctacaccgggggatttgaggtgcccgagggtaacgatggattcctctgggacgacatagacgacagcgtgttttccccgcaaccgcagaccctgctagagttgcaacagcgcgagcaggcagaggcggcgctgcgaaaggaaagcttccgcaggccaagcagcttgtccgatctaggcgctgcggccccgcggtcagatgcgagtagcccatttccaagcttgatagggtcttttaccagcactcgcaccacccgcccgcgcctgctgggcgaggaggagtacctaaacaactcgctgctgcagccgcagcgcgaaaagaacctgcctccggcatttcccaacaacgggatagagagcctagtggacaagatgagtagatggaagacgtatgcgcaggagcacagggatgtgcccggcccgcgcccgcccacccgtcgtcaaaggcacgaccgtcagcggggtctggtgtgggaggacgatgactcggcagacgacagcagcgtcctggatttgggagggagtggcaacccgtttgcgcaccttcgccccaggctggggagaatgttttaaaaaaaaaaaaaaaagcatgatgcaaaataaaaaactcaccaaggccatggcaccgagcgttggttttcttgtattccccttagtatgcagcgcgcggcgatgtatgaggaaggtcctcctccctcctacgagagcgtggtgagcgcggcgccagtggcggcggcgctgggttcccccttcgatgctcccctggacccgccgtttgtgcctccgcggtacctgcggcctaccggggggagaaacagcatccgttactctgagttggcacccctattcgacaccacccgtgtgtaccttgtggacaacaagtcaacggatgtggcatccctgaactaccagaacgaccacagcaactttctaaccacggtcattcaaaacaatgactacagcccgggggaggcaagcacacagaccatcaatcttgacgaccgttcgcactggggcggcgacctgaaaaccatcctgcataccaacatgccaaatgtgaacgagttcatgtttaccaataagtttaaggcgcgggtgatggtgtcgcgctcgcttactaaggacaaacaggtggagctgaaatatgagtgggtggagttcacgctgcccgagggcaactactccgagaccatgaccatagaccttatgaacaacgcgatcgtggagcactacttgaaagtgggcaggcagaacggggttctggaaagcgacatcggggtaaagtttgacacccgcaacttcagactggggtttgacccagtcactggtcttgtcatgcctggggtatatacaaacgaagccttccatccagacatcattttgctgccaggatgcggggtggacttcacccacagccgcctgagcaacttgttgggcatccgcaagcggcaacccttccaggagggctttaggatcacctacgatgacctggagggtggtaacattcccgcactgttggatgtggacgcctaccaggcaagcttaaaagatgacaccgaacagggcggggatggcgcaggcggcggcaacaacagtggcagcggcgcggaagagaactccaacgcggcagccgcggcaatgcagccggtggaggacatgaacgatcatgccattcgcggcgacacctttgccacacgggcggaggagaagcgcgctgaggccgaggcagcggcagaagctgccgcccccgctgcgcaacccgaggtcgagaagcctcagaagaaaccggtgatcaaacccctgacagaggacagcaagaaacgcagttacaacctaataagcaatgacagcaccttcacccagtaccgcagctggtaccttgcatacaactacggcgaccctcagaccgggatccgctcatggaccctcctttgcactcctgacgtaacctgcggctcggagcaggtctactggtcgttgccagacatgatgcaagaccccgtgaccttccgctccacgagccagatcagcaactttccggtggtgggcgccgagctgttgcccgtgcactccaagagcttctacaacgaccaggccgtctactcccagctcatccgccagtttacctctctgacccacgtgttcaatcgctttcccgagaaccagattttggcgcgcccgccagcccccaccatcaccaccgtcagtgaaaacgttcctgctctcacagatcacgggacgctaccgctgcgcaacagcatcggaggagtccagcgagtgaccattactgacgccagacgccgcacctgcccctacgtttacaaggccctgggcatagtctcgccgcgcgtcctatcgagccgcactttttgagcaaacatgtccatccttatatcgcccagcaataacacaggctggggcctgcgcttcccaagcaagatgtttggcggggcaaagaagcgctccgaccaacacccagtgcgcgtgcgcgggcactaccgcgcgccctggggcgcgcacaaacgcggccgcactgggcgcaccaccgtcgatgacgccattgacgcggtggtggaggaggcgcgcaactacacgcccacgccgccaccagtgtccacagtggacgcggccattcagaccgtggtgcgcggagcccggcgttatgctaaaatgaagagacggcggaggcgcgtagcacgtcgccaccgccgccgacccggcactgccgcccaacgcgcggcggcggccctgcttaaccgcgcacgtcgcaccggccgacgggcggccatgcgggccgctcgaaggctggccgcgggtattgtcactgtgccccccaggtccaggcgacgagcggccgccgcagcagccgcggccattagtgctatgactcagggtcgcaggggcaacgtgtactgggtgcgcgactcggttagcggcctgcgcgtgcccgtgcgcacccgccccccgcgcaactagattgcaagaaaaaactacttagactcgtactgttgtatgtatccagcggcggcggcgcgcaacgaagctatgtccaagcgcaaaatcaaagaagagatgctccaggtcatcgcgccggagatctatggccccccgaagaaggaagagcaggattacaagccccgaaagctaaagcgggtcaaaaagaaaaagaaagatgatgatgatgaacttgacgacgaggtggaactgctgcacgcaaccgcgcccaggcggcgggtacagtggaaaggtcgacgcgtaagacgtgttttgcgacccggcaccaccgtagtttttacgcccggtgagcgctccacccgcacctacaagcgcgtgtatgatgaggtgtacggcgacgaggacctgcttgagcaggccaacgagcgcctcggggagtttgcctacggaaagcggcataaggacatgttggcgttgccgctggacgagggcaacccaacacctagcctaaagcccgtgacactgcagcaggtgctgcccacgcttgcaccgtccgaagaaaagcgcggcctaaagcgcgagtctggtgacttggcacccaccgtgcagctgatggtacccaagcgccagcgactggaagatgtcttggaaaaaatgaccgtggagcctgggctggagcccgaggtccgcgtgcggccaatcaagcaggtggcaccgggactgggcgtgcagaccgtggacgttcagatacccaccaccagtagcactagtattgccactgccacagagggcatggagacacaaacgtccccggttgcctcggcggtggcagatgccgcggtgcaggcggccgctgcggccgcgtccaaaacctctacggaggtgcaaacggacccgtggatgtttcgcgtttcagccccccggcgcccgcgccgttccaggaagtacggcaccgccagcgcactactgcccgaatatgccctacatccttccatcgcgcctacccccggctatcgtggctacacctaccgccccagaagacgagcgactacccgacgccgaaccaccactggaacccgccgccgccgtcgccgtcgccagcccgtgctggccccgatttccgtgcgcagggtggctcgcgaaggaggcaggaccctggtgctgccaacagcgcgctaccaccccagcatcgtttaaaagccggtctttgtggttcttgcagatatggccctcacctgccgcctccgtttcccggtgccgggattccgaggaagaatgcaccgtaggaggggcatggccggccacggcctgacgggcggcatgcgtcgtgcgcaccaccggcggcggcgcgcgtcgcaccgtcgcatgcgcggcggtatcctgcccctccttattccactgatcgccgcggcgattggcgccgtgcccggaattgcatccgtggccttgcaggcgcagagacactgattaaaaacaagttgcatgtggaaaaatcaaaataaaaagtctggactctcacgctcgcttggtcctgtaactattttgtagaatggaagacatcaactttgcgtctctggccccgcgacacggctcgcgcccgttcatgggaaactggcaagatatcggcaccagcaatatgagcggtggcgccttcagctggggctcgctgtggagcggcattaaaaatttcggttccaccattaagaactatggcagcaaggcctggaacagcagcacaggccagatgctgagggacaagttgaaagagcaaaatttccaacaaaaggtggtagatggcctggcctctggcattagcggggtggtggacctggccaaccaggcagtgcaaaataagattaacagtaagcttgatccccgccctcccgtagaggagcctccaccggccgtggagacagtgtctccagaggggcgtggcgaaaagcgtccgcggcccgacagggaagaaactctggtgacgcaaatagatgagcctccctcgtacgaggaggcactaaagcaaggcctgcccaccacccgtcccatcgcgcccatggctaccggagtgctgggccagcacacacctgtaacgctggacctgcctccccccgctgacacccagcagaaacctgtgctgccagggccgtccgccgttgttgtaacccgccctagccgcgcgtccctgcgccgtgccgccagcggtccgcgatcgatgcggcccgtagccagtggcaactggcaaagcacactgaacagcatcgtgggtctgggggtgcaatccctgaagcgccgacgatgcttctaaatagctaacgtgtcgtatgtgtcatgtatgcgtccatgtcgccgccagaggagctgctgagccgccgtgcgcccgctttccaagatggctaccccttcgatgatgccgcagtggtcttacatgcacatctcgggccaggacgcctcggagtacctgagccccgggctggtgcagtttgcccgcgccaccgagacgtacttcagcctgaataacaagtttagaaaccccacggtggcacctacgcacgacgtaaccacagaccggtcccagcgtttgacgctgcggttcatccctgtggaccgcgaggataccgcgtactcgtacaaagcgcggttcaccctggctgtgggtgacaaccgtgtgcttgatatggcttccacgtactttgacatccgcggcgtgctggacagggggcctacttttaagccctactccggcactgcctacaacgctctagctcccaagggcgctcctaactcctgtgagtgggaacaaaccgaagatagcggccgggcagttgccgaggatgaagaagaggaagatgaagatgaagaagaggaagaagaagagcaaaacgctcgagatcaggctactaagaaaacacatgtctatgcccaggctcctttgtctggagaaacaattacaaaaagcgggctacaaataggatcagacaatgcagaaacacaagctaaacctgtatacgcagatccttcctatcaaccagaacctcaaattggcgaatctcagtggaacgaagctgatgctaatgcggcaggagggagagtgcttaaaaaaacaactcccatgaaaccatgctatggatcttatgccaggcctacaaatccttttggtggtcaatccgttctggttccggatgaaaaaggggtgcctcttccaaaggttgacttgcaattcttctcaaatactacctctttgaacgaccggcaaggcaatgctactaaaccaaaagtggttttgtacagtgaagatgtaaatatggaaaccccagacacacatctgtcttacaaacctggaaaaggtgatgaaaattctaaagctatgttgggtcaacaatctatgccaaacagacccaattacattgctttcagggacaattttattggcctaatgtattataacagcactggcaacatgggtgttcttgctggtcaggcatcgcagctaaatgccgtggtagatttgcaagacagaaacacagagctgtcctatcaactcttgcttgattccataggtgatagaaccagatatttttctatgtggaatcaggctgtagacagctatgatccagatgttagaatcattgaaaaccatggaactgaggatgaattgccaaattattgttttcctcttgggggtattggggtaactgacacctatcaagctattaaggctaatggcaatggctcaggcgataatggagatactacatggacaaaagatgaaacttttgcaacacgtaatgaaataggagtgggtaacaactttgccatggaaattaacctaaatgccaacctatggagaaatttcctttactccaatattgcgctgtacctgccagacaagctaaaatacaaccccaccaatgtggaaatatctgacaaccccaacacctacgactacatgaacaagcgagtggtggctcccgggcttgtagactgctacattaaccttggggcgcgctggtctctggactacatggacaacgttaatccctttaaccaccaccgcaatgcgggcctccgttatcgctccatgttgttgggaaacggccgctacgtgccctttcacattcaggtgccccaaaagttttttgccattaaaaacctcctcctcctgccaggctcatatacatatgaatggaacttcaggaaggatgttaacatggttctgcagagctctctgggaaacgatcttagagttgacggggctagcattaagtttgacagcatttgtctttacgccaccttcttccccatggcccacaacacggcctccacgctggaagccatgctcagaaatgacaccaacgaccagtcctttaatgactacctttccgccgccaacatgctataccccatacccgccaacgccaccaacgtgcccatctccatcccatcgcgcaactgggcagcatttcgcggttgggccttcacacgcttgaagacaaaggaaaccccttccctgggatcaggctacgacccttactacacctactctggctccataccataccttgacggaaccttctatcttaatcacacctttaagaaggtggccattacctttgactcttctgttagctggccgggcaacgaccgcctgcttactcccaatgagtttgagattaaacgctcagttgacggggagggctacaacgtagctcagtgcaacatgaccaaggactggttcctggtgcagatgttggccaactacaatattggctaccagggcttctacattccagaaagctacaaggaccgcatgtactcgttcttcagaaacttccagcccatgagccggcaagtggttgacgatactaaatacaaggagtatcagcaggttggaattcttcaccagcataacaactcaggattcgtaggctacctcgctcccaccatgcgcgagggacaggcttaccccgccaacgtgccctacccactaataggcaaaaccgcggttgacagtattacccagaaaaagtttctttgcgatcgcaccctttggcgcatcccattctccagtaactttatgtccatgggcgcactcacagacctgggccaaaaccttctctacgccaactccgcccacgcgctagacatgacttttgaggtggatcccatggacgagcccacccttctttatgttttgtttgaagtctttgacgtggtccgtgtgcaccagccgcaccgcggcgtcatcgagaccgtgtacctgcgcacgcccttctcggccggcaacgccacaacataaaagaagcaagcaacatcaacaacagctgccgccatgggctccagtgagcaggaactgaaagccattgtcaaagatcttggttgtgggccatattttttgggcacctatgacaagcgctttccaggctttgtttctccacacaagctcgcctgcgccatagtcaatacggccggtcgcgagactgggggcgtacactggatggcctttgcctggaacccgcgctcaaaaacatgctacctctttgagccctttggcttttctgaccaacgactcaagcaggtttaccagtttgagtacgagtcactcctgcgccgtagcgccattgcttcttcccccgaccgctgtataacgctggaaaagtccacccaaagcgtgcaggggcccaactcggccgcctgtggactattctgctgcatgtttctccacgcctttgccaactggccccaaactcccatggatcacaaccccaccatgaaccttattaccggggtacccaactccatgcttaacagtccccaggtacagcccaccctgcgtcgcaaccaggaacagctctacagcttcctggagcgccactcgccctacttccgcagccacagtgcgcagattaggagcgccacttctttttgtcacttgaaaaacatgtaaaaataatgtactaggagacactttcaataaaggcaaatgtttttatttgtacactctcgggtgattatttaccccccacccttgccgtctgcgccgtttaaaaatcaaaggggttctgccgcgcatcgctatgcgccactggcagggacacgttgcgatactggtgtttagtgctccacttaaactcaggcacaaccatccgcggcagctcggtgaagttttcactccacaggctgcgcaccatcaccaacgcgtttagcaggtcgggcgccgatatcttgaagtcgcagttggggcctccgccctgcgcgcgcgagttgcgatacacagggttgcagcactggaacactatcagcgccgggtggtgcacgctggccagcacgctcttgtcggagatcagatccgcgtccaggtcctccgcgttgctcagggcgaacggagtcaactttggtagctgccttcccaaaaagggtgcatgcccaggctttgagttgcactcgcaccgtagtggcatcagaaggtgaccgtgcccggtctgggcgttaggatacagcgcctgcatgaaagccttgatctgcttaaaagccacctgagcctttgcgccttcagagaagaacatgccgcaagacttgccggaaaactgattggccggacaggccgcgtcatgcacgcagcaccttgcgtcggtgttggagatctgcaccacatttcggccccaccggttcttcacgatcttggccttgctagactgctccttcagcgcgcgctgcccgttttcgctcgtcacatccatttcaatcacgtgctccttatttatcataatgctcccgtgtagacacttaagctcgccttcgatctcagcgcagcggtgcagccacaacgcgcagcccgtgggctcgtggtgcttgtaggttacctctgcaaacgactgcaggtacgcctgcaggaatcgccccatcatcgtcacaaaggtcttgttgctggtgaaggtcagctgcaacccgcggtgctcctcgtttagccaggtcttgcatacggccgccagagcttccacttggtcaggcagtagcttgaagtttgcctttagatcgttatccacgtggtacttgtccatcaacgcgcgcgcagcctccatgcccttctcccacgcagacacgatcggcaggctcagcgggtttatcaccgtgctttcactttccgcttcactggactcttccttttcctcttgcgtccgcataccccgcgccactgggtcgtcttcattcagccgccgcaccgtgcgcttacctcccttgccgtgcttgattagcaccggtgggttgctgaaacccaccatttgtagcgccacatcttctctttcttcctcgctgtccacgatcacctctggggatggcgggcgctcgggcttgggagaggggcgcttctttttctttttggacgcaatggccaaatccgccgtcgaggtcgatggccgcgggctgggtgtgcgcggcaccagcgcatcttgtgacgagtcttcttcgtcctcggactcgagacgccgcctcagccgcttttttgggggcgcgcggggaggcggcggcgacggcgacggggacgacacgtcctccatggttggtggacgtcgcgccgcaccgcgtccgcgctcgggggtggtttcgcgctgctcctcttcccgactggccatttccttctcctataggcagaaaaagatcatggagtcagtcgagaaggaggacagcctaaccgccccctttgagttcgccaccaccgcctccaccgatgccgccaacgcgcctaccaccttccccgtcgaggcacccccgcttgaggaggaggaagtgattatcgagcaggacccaggttttgtaagcgaagacgacgaggatcgctcagtaccaacagaggataaaaagcaagaccaggacgacgcagaggcaaacgaggaacaagtcgggcggggggaccaaaggcatggcgactacctagatgtgggagacgacgtgctgttgaagcatctgcagcgccagtgcgccattatctgcgacgcgttgcaagagcgcagcgatgtgcccctcgccatagcggatgtcagccttgcctacgaacgccacctgttctcaccgcgcgtaccccccaaacgccaagaaaacggcacatgcgagcccaacccgcgcctcaacttctaccccgtatttgccgtgccagaggtgcttgccacctatcacatctttttccaaaactgcaagatacccctatcctgccgtgccaaccgcagccgagcggacaagcagctggccttgcggcagggcgctgtcatacctgatatcgcctcgctcgacgaagtgccaaaaatctttgagggtcttggacgcgacgagaaacgcgcggcaaacgctctgcaacaagaaaacagcgaaaatgaaagtcactgtggagtgctggtggaacttgagggtgacaacgcgcgcctagccgtgctgaaacgcagcatcgaggtcacccactttgcctacccggcacttaacctaccccccaaggttatgagcacagtcatgagcgagctgatcgtgcgccgtgcacgacccctggagagggatgcaaacttgcaagaacaaaccgaggagggcctacccgcagttggcgatgagcagctggcgcgctggcttgagacgcgcgagcctgccgacttggaggagcgacgcaagctaatgatggccgcagtgcttgttaccgtggagcttgagtgcatgcagcggttctttgctgacccggagatgcagcgcaagctagaggaaacgttgcactacacctttcgccagggctacgtgcgccaggcctgcaaaatttccaacgtggagctctgcaacctggtctcctaccttggaattttgcacgaaaaccgcctcgggcaaaacgtgcttcattccacgctcaagggcgaggcgcgccgcgactacgtccgcgactgcgtttacttatttctgtgctacacctggcaaacggccatgggcgtgtggcagcaatgcctggaggagcgcaacctaaaggagctgcagaagctgctaaagcaaaacttgaaggacctatggacggccttcaacgagcgctccgtggccgcgcacctggcggacattatcttccccgaacgcctgcttaaaaccctgcaacagggtctgccagacttcaccagtcaaagcatgttgcaaaactttaggaactttatcctagagcgttcaggaattctgcccgccacctgctgtgcgcttcctagcgactttgtgcccattaagtaccgtgaatgccctccgccgctttggggtcactgctaccttctgcagctagccaactaccttgcctaccactccgacatcatggaagacgtgagcggtgacggcctactggagtgtcactgtcgctgcaacctatgcaccccgcaccgctccctggtctgcaattcgcaactgcttagcgaaagtcaaattatcggtacctttgagctgcagggtccctcgcctgacgaaaagtccgcggctccggggttgaaactcactccggggctgtggacgtcggcttaccttcgcaaatttgtacctgaggactaccacgcccacgagattaggttctacgaagaccaatcccgcccgccaaatgcggagcttaccgcctgcgtcattacccagggccacatccttggccaattgcaagccatcaacaaagcccgccaagagtttctgctacgaaagggacggggggtttacctggacccccagtccggcgaggagctcaacccaatccccccgccgccgcagccctatcagcagccgcgggcccttgcttcccaggatggcacccaaaaagaagctgcagctgccgccgccgccacccacggacgaggaggaatactgggacagtcaggcagaggaggttttggacgaggaggaggagatgatggaagactgggacagcctagacgaagcttccgaggccgaagaggtgtcagacgaaacaccgtcaccctcggtcgcattcccctcgccggcgccccagaaattggcaaccgttcccagcatcgctacaacctccgctcctcaggcgccgccggcactgcctgttcgccgacccaaccgtagatgggacaccactggaaccagggccggtaagtctaagcagccgccgccgttagcccaagagcaacaacagcgccaaggctaccgctcgtggcgcgggcacaagaacgccatagttgcttgcttgcaagactgtgggggcaacatctccttcgcccgccgctttcttctctaccatcacggcgtggccttcccccgtaacatcctgcattactaccgtcatctctacagcccctactgcaccggcggcagcggcagcggcagcaacagcagcggtcacacagaagcaaaggcgaccggatagcaagactctgacaaagcccaagaaatccacagcggcggcagcagcaggaggaggagcgctgcgtctggcgcccaacgaacccgtatcgacccgcgagcttagaaataggatttttcccactctgtatgctatatttcaacaaagcaggggccaagaacaagagctgaaaataaaaaacaggtctctgcgctccctcacccgcagctgcctgtatcacaaaagcgaagatcagcttcggcgcacgctggaagacgcggaggctctcttcagcaaatactgcgcgctgactcttaaggactagtttcgcgccctttctcaaatttaagcgcgaaaactacgtcatctccagcggccacacccggcgccagcacctgtcgtcagcgccattatgagcaaggaaattcccacgccctacatgtggagttaccagccacaaatgggacttgcggctggagctgcccaagactactcaacccgaataaactacatgagcgcgggaccccacatgatatcccgggtcaacggaatccgcgcccaccgaaaccgaattctcctcgaacaggcggctattaccaccacacctcgtaataaccttaatccccgtagttggcccgctgccctggtgtaccaggaaagtcccgctcccaccactgtggtacttcccagagacgcccaggccgaagttcagatgactaactcaggggcgcagcttgcgggcggctttcgtcacagggtgcggtcgcccgggcagggtataactcacctgaaaatcagagggcgaggtattcagctcaacgacgagtcggtgagctcctctcttggtctccgtccggacgggacatttcagatcggcggcgctggccgctcttcatttacgccccgtcaggcgatcctaactctgcagacctcgtcctcggagccgcgctccggaggcattggaactctacaatttattgaggagttcgtgccttcggtttacttcaaccccttttctggacctcccggccactacccggaccagtttattcccaactttgacgcggtgaaagactcggcggacggctacgactgaatgaccagtggagaggcagagcgactgcgcctgacacacctcgaccactgccgccgccacaagtgctttgcccgcggctccggtgagttttgttactttgaattgcccgaagagcatatcgagggcccggcgcacggcgtccggctcaccacccaggtagagcttacacgtagcctgattcgggagtttaccaagcgccccctgctagtggagcgggagcggggtccctgtgttctgaccgtggtttgcaactgtcctaaccctggattacatcaagatctttgttgtcatctctgtgctgagtataataaatacagaaattagaatctactggggctcctgtcgccatcctgtgaacgccaccgtttttacccacccaaagcagaccaaagcaaacctcacctccggtttgcacaagcgggccaataagtaccttacctggtactttaacggctcttcatttgtaatttacaacagtttccagcgagacgaagtaagtttgccacacaaccttctcggcttcaactacaccgtcaagaaaaacaccaccaccaccaccctcctcacctgccgggaacgtacgagtgcgtcaccggttgctgcgcccacacctacagcctgagcgtaaccagacattactcccatttttccaaaacaggaggtgagctcaactcccggaactcaggtcaaaaaagcattttgcggggtgctgggattttttaattaagtatatgagcaattcaagtaactctacaagcttgtctaatttttctggaattggggtcggggttatccttactcttgtaattctgtttattcttatactagcacttctgtgccttagggttgccgcctgctgcacgcacgtttgtacctattgtcagctttttaaacgctgggggcaacatccaagatgaggtacatgattttaggcttgctcgcccttgcggcagtctgcagcgctgccaaaaaggttgagtttaaggaaccagcttgcaatgttacatttaaatcagaagctaatgaatgcactactcttataaaatgcaccacagaacatgaaaagcttattattcgccacaaagacaaaattggcaagtatgctgtatatgctatttggcagccaggtgacactaacgactataatgtcacagtcttccaaggtgaaaatcgtaaaacttttatgtataaatttccattttatgaaatgtgcgatattaccatgtacatgagcaaacagtacaagttgtggcccccacaaaagtgtttagagaacactggcaccttttgttccaccgctctgcttattacagcgcttgctttggtatgtaccttactttatctcaaatacaaaagcagacgcagttttattgatgaaaagaaaatgccttgattttccgcttgcttgtattcccctggacaatttactctatgtgggatatgttccaggcgggcaagattatacccacaaccttcaaatcaaactttcctggacgttagcgcctgatttctgccagcgcctgcactgcaaatttgatcaaacccagcttcagcttgcctgctccagagatgaccggctcaaccatcgcgcccacaacggactatcgcaacaccactgctaccggactaacatctgccctaaatttaccccaagttcatgcctttgtcaatgactgggcgagcttggacatgtggtggttttccatagcgcttatgtttgtttgccttattattatgtggcttatttgttgcctaaagcgcagacgcgccagaccccccatctataggcctatcattgtgctcaacccacacaatgaaaaaattcatagattggacggtctgaaaccatgttctcttcttttacagtatgattaaatgagacatgattcctcgagttcttatattattgacccttgttgcgcttttctgtgcgtgctctacattggccgcggtcgctcacatcgaagtagattgcatcccacctttcacagtttacctgctttacggatttgtcacccttatcctcatctgcagcctcgtcactgtagtcatcgccttcattcagttcattgactgggtttgtgtgcgcattgcgtacctcaggcaccatccgcaatacagagacaggactatagctgatcttctcagaattctttaattatgaaacggagtgtcatttttgttttgctgattttttgcgccctacctgtgctttgctcccaaacctcagcgcctcccaaaagacatatttcctgcagattcactcaaatatggaacattcccagctgctacaacaaacagagcgatttgtcagaagcctggttatacgccatcatctctgtcatggttttttgcagtaccatttttgccctagccatatatccataccttgacattggctggaatgccatagatgccatgaaccaccctactttcccagtgcccgctgtcataccactgcaacaggttattgccccaatcaatcagcctcgccccccttctcccacccccactgagattagctactttaatttgacaggtggagatgactgaatctctagatctagaattggatggaattaacaccgaacagcgcctactagaaaggcgcaaggcggcgtccgagcgagaacgcctaaaacaagaagttgaagacatggttaacctacaccagtgtaaaagaggtatcttttgtgtggtcaagcaggccaaacttacctacgaaaaaaccactaccggcaaccgcctcagctacaagctacccacccagcgccaaaaactggtgcttatggtgggagaaaaacctatcaccgtcacccagcactcggcagaaacagagggctgcctgcacttcccctatcagggtccagaggacctctgcactcttattaaaaccatgtgtggtattagagatcttattccattcaactaacataaacacacaataaattacttacttaaaatcagtcagcaaatctttgtccagcttattcagcatcacctcctttccttcctcccaactctggtatctcagccgccttttagctgcaaactttctccaaagtttaaatgggatgtcaaattcctcatgttcttgtccctccgcacccactatcttcatattgttgcagatgaaacgcgccagaccgtctgaagacaccttcaaccccgtgtatccatatgacacagaaaccgggcctccaactgtgccctttcttacccctccatttgtttcacccaatggtttccaagaaagtccccctggagttctctctctacgcgtctccgaacctttggacacctcccacggcatgcttgcgcttaaaatgggcagcggtcttaccctagacaaggccggaaacctcacctcccaaaatgtaaccactgttactcagccacttaaaaaaacaaagtcaaacataagtttggacacctccgcaccacttacaattacctcaggcgccctaacagtggcaaccaccgctcctctgatagttactagcggcgctcttagcgtacagtcacaagccccactgaccgtgcaagactccaaactaagcattgctactaaagggcccattacagtgtcagatggaaagctagccctgcaaacatcagcccccctctctggcagtgacagcgacacccttactgtaactgcatcacccccgctaactactgccacgggtagcttgggcattaacatggaagatcctatttatgtaaataatggaaaaataggaattaaaataagcggtcctttgcaagtagcacaaaactccgatacactaacagtagttactggaccaggtgtcaccgttgaacaaaactcccttagaaccaaagttgcaggagctattggttatgattcatcaaacaacatggaaattaaaacgggcggtggcatgcgtataaataacaacttgttaattctagatgtggattacccatttgatgctcaaacaaaactacgtcttaaactggggcagggacccctgtatattaatgcatctcataacttggacataaactataacagaggcctatacctttttaatgcatcaaacaatactaaaaaactggaagttagcataaaaaaatccagtggactaaactttgataatactgccatagctataaatgcaggaaagggtctggagtttgatacaaacacatctgagtctccagatatcaacccaataaaaactaaaattggctctggcattgattacaatgaaaacggtgccatgattactaaacttggagcgggtttaagctttgacaactcaggggccattacaataggaaacaaaaatgatgacaaacttaccctgtggacaaccccagacccatctcctaactgcagaattcattcagataatgactgcaaatttactttggttcttacaaaatgtgggagtcaagtactagctactgtagctgctttggctgtatctggagatctttcatccatgacaggcaccgttgcaagtgttagtatattccttagatttgaccaaaacggtgttctaatggagaactcctcacttaaaaaacattactggaactttagaaatgggaactcaactaatgcaaatccatacacaaatgcagttggatttatgcctaaccttctagcctatccaaaaacccaaagtcaaactgctaaaaataacattgtcagtcaagtttacttgcatggtgataaaactaaacctatgatacttaccattacacttaatggcactagtgaatccacagaaactagcgaggtaagcacttactctatgtcttttacatggtcctgggaaagtggaaaatacaccactgaaacttttgctaccaactcttacaccttctcctacattgcccaggaataaagaatcgtgaacctgttgcatgttatgtttcaacgtgtttatttttcaattgcagaaaatttcaagtcatttttcattcagtagtatagccccaccaccacatagcttatattgatcaccgtaccttaatcaaactcacagaaccctagtattcaacctgccacctccctcccaacacacagagtacacagtcctttctccccggctggccttaaaaagcatcatatcatgggtaacagacatattcttaggtgttatattccacacggtttcctgtcgagccaaacgctcatcagtgatattaataaactccccgggcagctcgcttaagttcatgtcgctgtccagctgctgagccacaggctgctgtccaacttgcggttgctcaacgggcggcgaaggggaagtccacgcctacatgggggtagagtcataatcgtgcatcaggatagggcggtggtgctgcagcagcgcgcgaataaactgctgccgccgccgctccgtcctgcaggaatacaacatggcagtggtctcctcagcgatgattcgcaccgcccgcagcatgagacgccttgtcctccgggcacagcagcgcaccctgatctcacttaaatcagcacagtaactgcagcacagcaccacaatattgttcaaaatcccacagtgcaaggcgctgtatccaaagctcatggcggggaccacagaacccacgtggccatcataccacaagcgcaggtagattaagtggcgacccctcataaacacgctggacataaacattacctcttttggcatgttgtaattcaccacctcccggtaccatataaacctctgattaaacatggcgccatccaccaccatcctaaaccagctggccaaaacctgcccgccggctatgcactgcagggaaccgggactggaacaatgacagtggagagcccaggactcgtaaccatggatcatcatgctcgtcatgatatcaatgttggcacaacacaggcacacgtgcatacacttcctcaggattacaagctcctcccgcgtcagaaccatatcccagggaacaacccattcctgaatcagcgtaaatcccacactgcagggaagacctcgcacgtaactcacgttgtgcattgtcaaagtgttacattcgggcagcagcggatgatcctccagtatggtagcgcgggtctctgtctcaaaaggaggtaggcgatccctactgtacggagtgcgccgagacaaccgagatcgtgttggtcgtagtgtcatgccaaatggaacgccggacgtagtcatatttcctgaagcaaaaccaggtgcgggcgtgacaaacagatctgcgtctccggtctcgtcgcttagctcgctctgtgtagtagttgtagtatatccactctctcaaagcatccaggcgccccctggcttcgggttctatgtaaactccttcatgcgccgctgccctgataacatccaccaccgcagaataagccacacccagccaacctacacattcgttctgcgagtcacacacgggaggagcgggaagagctggaagaaccatgttttttttttttttattccaaaagattatccaaaacctcaaaatgaagatctattaagtgaacgcgctcccctccggtggcgtggtcaaactctacagccaaagaacagataatggcatttgtaagatgttgcacaatggcttccaaaaggcaaactgccctcacgtccaagtggacgtaaaggctaaacccttcagggtgaatctcctctataaacattccagcaccttcaaccatgcccaaataattttcatctcgccaccttatcaatatgtctctaagcaaatcccgaatattaagtccggccattgtaaaaatctgctccagagcgccctccaccttcagcctcaagcagcgaatcatgattgcaaaaattcaggttcctcacagacctgtataagattcaaaagcggaacattaacaaaaataccgcgatcccgtaggtcccttcgcagggccagctgaacataatcgtgcaggtctgcacggaccagcgcggccacttccccgccaggaaccatgacaaaagaacccacactgattatgacacgcatactcggagctatgctaaccagcgtagcccctatgtaagcttgttgcatgggcggcgatataaaatgcaaggtgctgctcaaaaaatcaggcaaagcctcgcgcaaaaaagcaagcacatcgtagtcatgctcatgcagataaaggcaggtaagttccggaaccaccacagaaaaagacaccatttttctctcaaacatgtctgcgggttcctgcattaaacacaaaataaaataacaaaaaaaaaaacatttaaacattagaagcctgtcttacaacaggaaaaacaacccttataagcataagacggactacggccatgccggcgtgaccgtaaaaaaactggtcaccgtgattaaaaagcaccaccgacagttcctcggtcatgtccggagtcataatgtaagactcggtaaacacatcaggttggttaacatcggtcagtgctaaaaagcgaccgaaatagcccgggggaatacatacccgcaggcgtagagacaacattacagcccccataggaggtataacaaaattaataggagagaaaaacacataaacacctgaaaaaccctcctgcctaggcaaaatagcaccctcccgctccagaacaacatacagcgcttccacagcggcagccataacagtcagccttaccagtaaaaaaacctattaaaaaacaccactcgacacggcaccagctcaatcagtcacagtgtaaaaagggccaagtacagagcgagtatatataggactaaaaaatgacgtaacggttaaagtccacaaaaaacacccagaaaaccgcacgcgaacctacgcccagaaacgaaagccaaaaaacccacaacttcctcaaatcttcacttccgttttcccacgatacgtcacttcccattttaaaaaaactacaattcccaatacatgcaagttactccgccctaaaacctacgtcacccgccccgttcccacgccccgcgccacgtcacaaactccaccccctcattatcatattggcttcaatccaaaataaggtatattattgatgatgttaattaa

SEQ ID NO: 16 - DNA, 35949 bp, Adenovirus C5
  MISC_FEATURE (1)..(35949): Complete Genome
ttaattaacatcatcaataatataccttattttggattgaagccaatatgataatgagggggtggagtttgtgacgtggcgcggggcgtgggaacggggcgggtgacgtagtagtgtggcggaagtgtgatgttgcaagtgtggcggaacacatgtaagcgacggatgtggcaaaagtgacgtttttggtgtgcgccggtgtacacaggaagtgacaattttcgcgcggttttaggcggatgttgtagtaaatttgggcgtaaccgagtaagatttggccattttcgcgggaaaactgaataagaggaagtgaaatctgaataattttgtgttactcatagcgcgtaatatttgtctagggccgcggggactttgaccgtttacgtggagactcgcccaggtgtttttctcaggtgttttccgcgttccgggtcaaagttggcgttttattattatagtcagctgacgtgtagtgtatttatacccggtgagttcctcaagaggccactcttgagtgccagcgagtagagttttctcctccgagccgctccgacaccgggactgaaaatgagacatattatctgccacggaggtgttattaccgaagaaatggccgccagtcttttggaccagctgatcgaagaggtactggctgataatcttccacctcctagccattttgaaccacctacccttcacgaactgtatgatttagacgtgacggcccccgaagatcccaacgaggaggcggtttcgcagatttttcccgactctgtaatgttggcggtgcaggaagggattgacttactcacttttccgccggcgcccggttctccggagccgcctcacctttcccggcagcccgagcagccggagcagagagccttgggtccggtttctatgccaaaccttgtaccggaggtgatcgatcttacctgccacgaggctggctttccacccagtgacgacgaggatgaagagggtgaggagtttgtgttagattatgtggagcaccccgggcacggttgcaggtcttgtcattatcaccggaggaatacgggggacccagatattatgtgttcgctttgctatatgaggacctgtggcatgtttgtctacagtaagtgaaaattatgggcagtgggtgatagagtggtgggtttggtgtggtaattttttttttaatttttacagttttgtggtttaaagaattttgtattgtgatttttttaaaaggtcctgtgtctgaacctgagcctgagcccgagccagaaccggagcctgcaagacctacccgccgtcctaaaatggcgcctgctatcctgagacgcccgacatcacctgtgtctagagaatgcaatagtagtacggatagctgtgactccggtccttctaacacacctcctgagatacacccggtggtcccgctgtgccccattaaaccagttgccgtgagagttggtgggcgtcgccaggctgtggaatgtatcgaggacttgcttaacgagcctgggcaacctttggacttgagctgtaaacgccccaggccataaggtgtaaacctgtgattgcgtgtgtggttaacgcctttgtttgctgaatgagttgatgtaagtttaataaagggtgagataatgtttaacttgcatggcgtgttaaatggggcggggcttaaagggtatataatgcgccgtgggctaatcttggttacatctgacctcatggaggcttgggagtgtttggaagatttttctgctgtgcgtaacttgctggaacagagctctaacagtacctcttggttttggaggtttctgtggggctcatcccaggcaaagttagtctgcagaattaaggaggattacaagtgggaatttgaagagcttttgaaatcctgtggtgagctgtttgattctttgaatctgggtcaccaggcgcttttccaagagaaggtcatcaagactttggatttttccacaccggggcgcgctgcggctgctgttgcttttttgagttttataaaggataaatggagcgaagaaacccatctgagcggggggtacctgctggattttctggccatgcatctgtggagagcggttgtgagacacaagaatcgcctgctactgttgtcttccgtccgcccggcgataataccgacggaggagcagcagcagcagcaggaggaagccaggcggcggcggcaggagcagagcccatggaacccgagagccggcctggaccctcgggaatgaatgttgtacaggtggctgaactgtatccagaactgagacgcattttgacaattacagaggatgggcaggggctaaagggggtaaagagggagcggggggcttgtgaggctacagaggaggctaggaatctagcttttagcttaatgaccagacaccgtcctgagtgtattacttttcaacagatcaaggataattgcgctaatgagcttgatctgctggcgcagaagtattccatagagcagctgaccacttactggctgcagccaggggatgattttgaggaggctattagggtatatgcaaaggtggcacttaggccagattgcaagtacaagatcagcaaacttgtaaatatcaggaattgttgctacatttctgggaacggggccgaggtggagatagatacggaggatagggtggcctttagatgtagcatgataaatatgtggccgggggtgcttggcatggacggggtggttattatgaatgtaaggtttactggccccaattttagcggtacggttttcctggccaataccaaccttatcctacacggtgtaagcttctatgggtttaacaatacctgtgtggaagcctggaccgatgtaagggttcggggctgtgccttttactgctgctggaagggggtggtgtgtcgccccaaaagcagggcttcaattaagaaatgcctctttgaaaggtgtaccttgggtatcctgtctgagggtaactccagggtgcgccacaatgtggcctccgactgtggttgcttcatgctagtgaaaagcgtggctgtgattaagcataacatggtatgtggcaactgcgaggacagggcctctcagatgctgacctgctcggacggcaactgtcacctgctgaagaccattcacgtagccagccactctcgcaaggcctggccagtgtttgagcataacatactgacccgctgttccttgcatttgggtaacaggaggggggtgttcctaccttaccaatgcaatttgagtcacactaagatattgcttgagcccgagagcatgtccaaggtgaacctgaacggggtgtttgacatgaccatgaagatctggaaggtgctgaggtacgatgagacccgcaccaggtgcagaccctgcgagtgtggcggtaaacatattaggaaccagcctgtgatgctggatgtgaccgaggagctgaggcccgatcacttggtgctggcctgcacccgcgctgagtttggctctagcgatgaagatacagattgaggtactgaaatgtgtgggcgtggcttaagggtgggaaagaatatataaggtgggggtcttatgtagttttgtatctgttttgcagcagccgccgccgccatgagcaccaactcgtttgatggaagcattgtgagctcatatttgacaacgcgcatgcccccatgggccggggtgcgtcagaatgtgatgggctccagcattgatggtcgccccgtcctgcccgcaaactctactaccttgacctacgagaccgtgtctggaacgccgttggagactgcagcctccgccgccgcttcagccgctgcagccaccgcccgcgggattgtgactgactttgctttcctgagcccgcttgcaagcagtgcagcttcccgttcatccgcccgcgatgacaagttgacggctcttttggcacaattggattctttgacccgggaacttaatgtcgtttctcagcagctgttggatctgcgccagcaggtttctgccctgaaggcttcctcccctcccaatgcggtttaaaacataaataaaaaaccagactctgtttggatttggatcaagcaagtgtcttgctgtctttatttaggggttttgcgcgcgcggtaggcccgggaccagcggtctcggtcgttgagggtcctgtgtattttttccaggacgtggtaaaggtgactctggatgttcagatacatgggcataagcccgtctctggggtggaggtagcaccactgcagagcttcatgctgcggggtggtgttgtagatgatccagtcgtagcaggagcgctgggcgtggtgcctaaaaatgtctttcagtagcaagctgattgccaggggcaggcccttggtgtaagtgtttacaaagcggttaagctgggatgggtgcatacgtggggatatgagatgcatcttggactgtatttttaggttggctatgttcccagccatatccctccggggattcatgttgtgcagaaccaccagcacagtgtatccggtgcacttgggaaatttgtcatgtagcttagaaggaaatgcgtggaagaacttggagacgcccttgtgacctccaagattttccatgcattcgtccataatgatggcaatgggcccacgggcggcggcctgggcgaagatatttctgggatcactaacgtcatagttgtgttccaggatgagatcgtcataggccatttttacaaagcgcgggcggagggtgccagactgcggtataatggttccatccggcccaggggcgtagttaccctcacagatttgcatttcccacgctttgagttcagatggggggatcatgtctacctgcggggcgatgaagaaaacggtttccggggtaggggagatcagctgggaagaaagcaggttcctgagcagctgcgacttaccgcagccggtgggcccgtaaatcacacctattaccggctgcaactggtagttaagagagctgcagctgccgtcatccctgagcaggggggccacttcgttaagcatgtccctgactcgcatgttttccctgaccaaatccgccagaaggcgctcgccgcccagcgatagcagttcttgcaaggaagcaaagtttttcaacggtttgagaccgtccgccgtaggcatgcttttgagcgtttgaccaagcagttccaggcggtcccacagctcggtcacctgctctacggcatctcgatccagcatatctcctcgtttcgcgggttggggcggctttcgctgtacggcagtagtcggtgctcgtccagacgggccagggtcatgtctttccacgggcgcagggtcctcgtcagcgtagtctgggtcacggtgaaggggtgcgctccgggctgcgcgctggccagggtgcgcttgaggctggtcctgctggtgctgaagcgctgccggtcttcgccctgcgcgtcggccaggtagcatttgaccatggtgtcatagtccagcccctccgcggcgtggcccttggcgcgcagcttgcccttggaggaggcgccgcacgaggggcagtgcagacttttgagggcgtagagcttgggcgcgagaaataccgattccggggagtaggcatccgcgccgcaggccccgcagacggtctcgcattccacgagccaggtgagctctggccgttcggggtcaaaaaccaggtttcccccatgctttttgatgcgtttcttacctctggtttccatgagccggtgtccacgctcggtgacgaaaaggctgtccgtgtccccgtatacagacttgagaggcctgtcctcgagcggtgttccgcggtcctcctcgtatagaaactcggaccactctgagacaaaggctcgcgtccaggccagcacgaaggaggctaagtgggaggggtagcggtcgttgtccactagggggtccactcgctccagggtgtgaagacacatgtcgccctcttcggcatcaaggaaggtgattggtttgtaggtgtaggccacgtgaccgggtgttcctgaaggggggctataaaagggggtgggggcgcgttcgtcctcactctcttccgcatcgctgtctgcgagggccagctgttggggtgagtactccctctgaaaagcgggcatgacttctgcgctaagattgtcagtttccaaaaacgaggaggatttgatattcacctggcccgcggtgatgcctttgagggtggccgcatccatctggtcagaaaagacaatctttttgttgtcaagcttggtggcaaacgacccgtagagggcgttggacagcaacttggcgatggagcgcagggtttggtttttgtcgcgatcggcgcgctccttggccgcgatgtttagctgcacgtattcgcgcgcaacgcaccgccattcgggaaagacggtggtgcgctcgtcgggcaccaggtgcacgcgccaaccgcggttgtgcagggtgacaaggtcaacgctggtggctacctctccgcgtaggcgctcgttggtccagcagaggcggccgcccttgcgcgagcagaatggcggtagggggtctagctgcgtctcgtccggggggtctgcgtccacggtaaagaccccgggcagcaggcgcgcgtcgaagtagtctatcttgcatccttgcaagtctagcgcctgctgccatgcgcgggcggcaagcgcgcgctcgtatgggttgagtgggggaccccatggcatggggtgggtgagcgcggaggcgtacatgccgcaaatgtcgtaaacgtagaggggctctctgagtattccaagatatgtagggtagcatcttccaccgcggatgctggcgcgcacgtaatcgtatagttcgtgcgagggagcgaggaggtcgggaccgaggttgctacgggcgggctgctctgctcggaagactatctgcctgaagatggcatgtgagttggatgatatggttggacgctggaagacgttgaagctggcgtctgtgagacctaccgcgtcacgcacgaaggaggcgtaggagtcgcgcagcttgttgaccagctcggcggtgacctgcacgtctagggcgcagtagtccagggtttccttgatgatgtcatacttatcctgtcccttttttttccacagctcgcggttgaggacaaactcttcgcggtctttccagtactcttggatcggaaacccgtcggcctccgaacggtaagagcctagcatgtagaactggttgacggcctggtaggcgcagcatcccttttctacgggtagcgcgtatgcctgcgcggccttccggagcgaggtgtgggtgagcgcaaaggtgtccctgaccatgactttgaggtactggtatttgaagtcagtgtcgtcgcatccgccctgctcccagagcaaaaagtccgtgcgctttttggaacgcggatttggcagggcgaaggtgacatcgttgaagagtatctttcccgcgcgaggcataaagttgcgtgtgatgcggaagggtcccggcacctcggaacggttgttaattacctgggcggcgagcacgatctcgtcaaagccgttgatgttgtggcccacaatgtaaagttccaagaagcgcgggatgcccttgatggaaggcaattttttaagttcctcgtaggtgagctcttcaggggagctgagcccgtgctctgaaagggcccagtctgcaagatgagggttggaagcgacgaatgagctccacaggtcacgggccattagcatttgcaggtggtcgcgaaaggtcctaaactggcgacctatggccattttttctggggtgatgcagtagaaggtaagcgggtcttgttcccagcggtcccatccaaggttcgcggctaggtctcgcgcggcagtcactagaggctcatctccgccgaacttcatgaccagcatgaagggcacgagctgcttcccaaaggcccccatccaagtataggtctctacatcgtaggtgacaaagagacgctcggtgcgaggatgcgagccgatcgggaagaactggatctcccgccaccaattggaggagtggctattgatgtggtgaaagtagaagtccctgcgacgggccgaacactcgtgctggcttttgtaaaaacgtgcgcagtactggcagcggtgcacgggctgtacatcctgcacgaggttgacctgacgaccgcgcacaaggaagcagagtgggaatttgagcccctcgcctggcgggtttggctggtggtcttctacttcggctgcttgtccttgaccgtctggctgctcgaggggagttacggtggatcggaccaccacgccgcgcgagcccaaagtccagatgtccgcgcgcggcggtcggagcttgatgacaacatcgcgcagatgggagctgtccatggtctggagctcccgcggcgtcaggtcaggcgggagctcctgcaggtttacctcgcatagacgggtcagggcgcgggctagatccaggtgatacctaatttccaggggctggttggtggcggcgtcgatggcttgcaagaggccgcatccccgcggcgcgactacggtaccgcgcggcgggcggtgggccgcgggggtgtccttggatgatgcatctaaaagcggtgacgcgggcgagcccccggaggtagggggggctccggacccgccgggagagggggcaggggcacgtcggcgccgcgcgcgggcaggagctggtgctgcgcgcgtaggttgctggcgaacgcgacgacgcggcggttgatctcctgaatctggcgcctctgcgtgaagacgacgggcccggtgagcttgaacctgaaagagagttcgacagaatcaatttcggtgtcgttgacggcggcctggcgcaaaatctcctgcacgtctcctgagttgtcttgataggcgatctcggccatgaactgctcgatctcttcctcctggagatctccgcgtccggctcgctccacggtggcggcgaggtcgttggaaatgcgggccatgagctgcgagaaggcgttgaggcctccctcgttccagacgcggctgtagaccacgcccccttcggcatcgcgggcgcgcatgaccacctgcgcgagattgagctccacgtgccgggcgaagacggcgtagtttcgcaggcgctgaaagaggtagttgagggtggtggcggtgtgttctgccacgaagaagtacataacccagcgtcgcaacgtggattcgttgatatcccccaaggcctcaaggcgctccatggcctcgtagaagtccacggcgaagttgaaaaactgggagttgcgcgccgacacggttaactcctcctccagaagacggatgagctcggcgacagtgtcgcgcacctcgcgctcaaaggctacaggggcctcttcttcttcttcaatctcctcttccataagggcctccccttcttcttcttctggcggcggtgggggaggggggacacggcggcgacgacggcgcaccgggaggcggtcgacaaagcgctcgatcatctccccgcggcgacggcgcatggtctcggtgacggcgcggccgttctcgcgggggcgcagttggaagacgccgcccgtcatgtcccggttatgggttggcggggggctgccatgcggcagggatacggcgctaacgatgcatctcaacaattgttgtgtaggtactccgccgccgagggacctgagcgagtccgcatcgaccggatcggaaaacctctcgagaaaggcgtctaaccagtcacagtcgcaaggtaggctgagcaccgtggcgggcggcagcgggcggcggtcggggttgtttctggcggaggtgctgctgatgatgtaattaaagtaggcggtcttgagacggcggatggtcgacagaagcaccatgtccttgggtccggcctgctgaatgcgcaggcggtcggccatgccccaggcttcgttttgacatcggcgcaggtctttgtagtagtcttgcatgagcctttctaccggcacttcttcttctccttcctcttgtcctgcatctcttgcatctatcgctgcggcggcggcggagtttggccgtaggtggcgccctcttcctcccatgcgtgtgaccccgaagcccctcatcggctgaagcagggctaggtcggcgacaacgcgctcggctaatatggcctgctgcacctgcgtgagggtagactggaagtcatccatgtccacaaagcggtggtatgcgcccgtgttgatggtgtaagtgcagttggccataacggaccagttaacggtctggtgacccggctgcgagagctcggtgtacctgagacgcgagtaagccctcgagtcaaatacgtagtcgttgcaagtccgcaccaggtactggtatcccaccaaaaagtgcggcggcggctggcggtagaggggccagcgtagggtggccggggctccgggggcgagatcttccaacataaggcgatgatatccgtagatgtacctggacatccaggtgatgccggcggcggtggtggaggcgcgcggaaagtcgcggacgcggttccagatgttgcgcagcggcaaaaagtgctccatggtcgggacgctctggccggtcaggcgcgcgcaatcgttgacgctctagaccgtgcaaaaggagagcctgtaagcgggcactcttccgtggtctggtggataaattcgcaagggtatcatggcggacgaccggggttcgagccccgtatccggccgtccgccgtgatccatgcggttaccgcccgcgtgtcgaacccaggtgtgcgacgtcagacaacgggggagtgctccttttggcttccttccaggcgcggcggctgctgcgctagcttttttggccactggccgcgcgcagcgtaagcggttaggctggaaagcgaaagcattaagtggctcgctccctgtagccggagggttattttccaagggttgagtcgcgggacccccggttcgagtctcggaccggccggactgcggcgaacgggggtttgcctccccgtcatgcaagaccccgcttgcaaattcctccggaaacagggacgagccccttttttgcttttcccagatgcatccggtgctgcggcagatgcgcccccctcctcagcagcggcaagagcaagagcagcggcagacatgcagggcaccctcccctcctcctaccgcgtcaggaggggcgacatccgcggttgacgcggcagcagatggtgattacgaacccccgcggcgccgggcccggcactacctggacttggaggagggcgagggcctggcgcggctaggagcgccctctcctgagcggcacccaagggtgcagctgaagcgtgatacgcgtgaggcgtacgtgccgcggcagaacctgtttcgcgaccgcgagggagaggagcccgaggagatgcgggatcgaaagttccacgcagggcgcgagctgcggcatggcctgaatcgcgagcggttgctgcgcgaggaggactttgagcccgacgcgcgaaccgggattagtcccgcgcgcgcacacgtggcggccgccgacctggtaaccgcatacgagcagacggtgaaccaggagattaactttcaaaaaagctttaacaaccacgtgcgtacgcttgtggcgcgcgaggaggtggctataggactgatgcatctgtgggactttgtaagcgcgctggagcaaaacccaaatagcaagccgctcatggcgcagctgttccttatagtgcagcacagcagggacaacgaggcattcagggatgcgctgctaaacatagtagagcccgagggccgctggctgctcgatttgataaacatcctgcagagcatagtggtgcaggagcgcagcttgagcctggctgacaaggtggccgccatcaactattccatgcttagcctgggcaagttttacgcccgcaagatataccataccccttacgttcccatagacaaggaggtaaagatcgaggggttctacatgcgcatggcgctgaaggtgcttaccttgagcgacgacctgggcgtttatcgcaacgagcgcatccacaaggccgtgagcgtgagccggcggcgcgagctcagcgaccgcgagctgatgcacagcctgcaaagggccctggctggcacgggcagcggcgatagagaggccgagtcctactttgacgcgggcgctgacctgcgctgggccccaagccgacgcgccctggaggcagctggggccggacctgggctggcggtggcacccgcgcgcgctggcaacgtcggcggcgtggaggaatatgacgaggacgatgagtacgagccagaggacggcgagtactaagcggtgatgtttctgatcagatgatgcaagacgcaacggacccggcggtgcgggcggcgctgcagagccagccgtccggccttaactccacggacgactggcgccaggtcatggaccgcatcatgtcgctgactgcgcgcaatcctgacgcgttccggcagcagccgcaggccaaccggctctccgcaattctggaagcggtggtcccggcgcgcgcaaaccccacgcacgagaaggtgctggcgatcgtaaacgcgctggccgaaaacagggccatccggcccgacgaggccggcctggtctacgacgcgctgcttcagcgcgtggctcgttacaacagcggcaacgtgcagaccaacctggaccggctggtgggggatgtgcgcgaggccgtggcgcagcgtgagcgcgcgcagcagcagggcaacctgggctccatggttgcactaaacgccttcctgagtacacagcccgccaacgtgccgcggggacaggaggactacaccaactttgtgagcgcactgcggctaatggtgactgagacaccgcaaagtgaggtgtaccagtctgggccagactattttttccagaccagtagacaaggcctgcagaccgtaaacctgagccaggctttcaaaaacttgcaggggctgtggggggtgcgggctcccacaggcgaccgcgcgaccgtgtctagcttgctgacgcccaactcgcgcctgttgctgctgctaatagcgcccttcacggacagtggcagcgtgtcccgggacacatacctaggtcacttgctgacactgtaccgcgaggccataggtcaggcgcatgtggacgagcatactttccaggagattacaagtgtcagccgcgcgctggggcaggaggacacgggcagcctggaggcaaccctaaactacctgctgaccaaccggcggcagaagatcccctcgttgcacagtttaaacagcgaggaggagcgcattttgcgctacgtgcagcagagcgtgagccttaacctgatgcgcgacggggtaacgcccagcgtggcgctggacatgaccgcgcgcaacatggaaccgggcatgtatgcctcaaaccggccgtttatcaaccgcctaatggactacttgcatcgcgcggccgccgtgaaccccgagtatttcaccaatgccatcttgaacccgcactggctaccgccccctggtttctacaccgggggattcgaggtgcccgagggtaacgatggattcctctgggacgacatagacgacagcgtgttttccccgcaaccgcagaccctgctagagttgcaacagcgcgagcaggcagaggcggcgctgcgaaaggaaagcttccgcaggccaagcagcttgtccgatctaggcgctgcggccccgcggtcagatgctagtagcccatttccaagcttgatagggtctcttaccagcactcgcaccacccgcccgcgcctgctgggcgaggaggagtacctaaacaactcgctgctgcagccgcagcgcgaaaaaaacctgcctccggcatttcccaacaacgggatagagagcctagtggacaagatgagtagatggaagacgtacgcgcaggagcacagggacgtgccaggcccgcgcccgcccacccgtcgtcaaaggcacgaccgtcagcggggtctggtgtgggaggacgatgactcggcagacgacagcagcgtcctggatttgggagggagtggcaacccgtttgcgcaccttcgccccaggctggggagaatgttttaaaaaaaaaaaaagcatgatgcaaaataaaaaactcaccaaggccatggcaccgagcgttggttttcttgtattccccttagtatgcggcgcgcggcgatgtatgaggaaggtcctcctccctcctacgagagtgtggtgagcgcggcgccagtggcggcggcgctgggttctcccttcgatgctcccctggacccgccgtttgtgcctccgcggtacctgcggcctaccggggggagaaacagcatccgttactctgagttggcacccctattcgacaccacccgtgtgtacctggtggacaacaagtcaacggatgtggcatccctgaactaccagaacgaccacagcaactttctgaccacggtcattcaaaacaatgactacagcccgggggaggcaagcacacagaccatcaatcttgacgaccggtcgcactggggcggcgacctgaaaaccatcctgcataccaacatgccaaatgtgaacgagttcatgtttaccaataagtttaaggcgcgggtgatggtgtcgcgcttgcctactaaggacaatcaggtggagctgaaatacgagtgggtggagttcacgctgcccgagggcaactactccgagaccatgaccatagaccttatgaacaacgcgatcgtggagcactacttgaaagtgggcagacagaacggggttctggaaagcgacatcggggtaaagtttgacacccgcaacttcagactggggtttgaccccgtcactggtcttgtcatgcctggggtatatacaaacgaagccttccatccagacatcattttgctgccaggatgcggggtggacttcacccacagccgcctgagcaacttgttgggcatccgcaagcggcaacccttccaggagggctttaggatcacctacgatgatctggagggtggtaacattcccgcactgttggatgtggacgcctaccaggcgagcttgaaagatgacaccgaacagggcgggggtggcgcaggcggcagcaacagcagtggcagcggcgcggaagagaactccaacgcggcagccgcggcaatgcagccggtggaggacatgaacgatcatgccattcgcggcgacacctttgccacacgggctgaggagaagcgcgctgaggccgaagcagcggccgaagctgccgcccccgctgcgcaacccgaggtcgagaagcctcagaagaaaccggtgatcaaacccctgacagaggacagcaagaaacgcagttacaacctaataagcaatgacagcaccttcacccagtaccgcagctggtaccttgcatacaactacggcgaccctcagaccggaatccgctcatggaccctgctttgcactcctgacgtaacctgcggctcggagcaggtctactggtcgttgccagacatgatgcaagaccccgtgaccttccgctccacgcgccagatcagcaactttccggtggtgggcgccgagctgttgcccgtgcactccaagagcttctacaacgaccaggccgtctactcccaactcatccgccagtttacctctctgacccacgtgttcaatcgctttcccgagaaccagattttggcgcgcccgccagcccccaccatcaccaccgtcagtgaaaacgttcctgctctcacagatcacgggacgctaccgctgcgcaacagcatcggaggagtccagcgagtgaccattactgacgccagacgccgcacctgcccctacgtttacaaggccctgggcatagtctcgccgcgcgtcctatcgagccgcactttttgagcaagcatgtccatccttatatcgcccagcaataacacaggctggggcctgcgcttcccaagcaagatgtttggcggggccaagaagcgctccgaccaacacccagtgcgcgtgcgcgggcactaccgcgcgccctggggcgcgcacaaacgcggccgcactgggcgcaccaccgtcgatgacgccatcgacgcggtggtggaggaggcgcgcaactacacgcccacgccgccaccagtgtccacagtggacgcggccattcagaccgtggtgcgcggagcccggcgctatgctaaaatgaagagacggcggaggcgcgtagcacgtcgccaccgccgccgacccggcactgccgcccaacgcgcggcggcggccctgcttaaccgcgcacgtcgcaccggccgacgggcggccatgcgggccgctcgaaggctggccgcgggtattgtcactgtgccccccaggtccaggcgacgagcggccgccgcagcagccgcggccattagtgctatgactcagggtcgcaggggcaacgtgtattgggtgcgcgactcggttagcggcctgcgcgtgcccgtgcgcacccgccccccgcgcaactagattgcaagaaaaaactacttagactcgtactgttgtatgtatccagcggcggcggcgcgcaacgaagctatgtccaagcgcaaaatcaaagaagagatgctccaggtcatcgcgccggagatctatggccccccgaagaaggaagagcaggattacaagccccgaaagctaaagcgggtcaaaaagaaaaagaaagatgatgatgatgaacttgacgacgaggtggaactgctgcacgctaccgcgcccaggcgacgggtacagtggaaaggtcgacgcgtaaaacgtgttttgcgacccggcaccaccgtagtctttacgcccggtgagcgctccacccgcacctacaagcgcgtgtatgatgaggtgtacggcgacgaggacctgcttgagcaggccaacgagcgcctcggggagtttgcctacggaaagcggcataaggacatgctggcgttgccgctggacgagggcaacccaacacctagcctaaagcccgtaacactgcagcaggtgctgcccgcgcttgcaccgtccgaagaaaagcgcggcctaaagcgcgagtctggtgacttggcacccaccgtgcagctgatggtacccaagcgccagcgactggaagatgtcttggaaaaaatgaccgtggaacctgggctggagcccgaggtccgcgtgcggccaatcaagcaggtggcgccgggactgggcgtgcagaccgtggacgttcagatacccactaccagtagcaccagtattgccaccgccacagagggcatggagacacaaacgtccccggttgcctcagcggtggcggatgccgcggtgcaggcggtcgctgcggccgcgtccaagacctctacggaggtgcaaacggacccgtggatgtttcgcgtttcagccccccggcgcccgcgccgttcgaggaagtacggcgccgccagcgcgctactgcccgaatatgccctacatccttccattgcgcctacccccggctatcgtggctacacctaccgccccagaagacgagcaactacccgacgccgaaccaccactggaacccgccgccgccgtcgccgtcgccagcccgtgctggccccgatttccgtgcgcagggtggctcgcgaaggaggcaggaccctggtgctgccaacagcgcgctaccaccccagcatcgtttaaaagccggtctttgtggttcttgcagatatggccctcacctgccgcctccgtttcccggtgccgggattccgaggaagaatgcaccgtaggaggggcatggccggccacggcctgacgggcggcatgcgtcgtgcgcaccaccggcggcggcgcgcgtcgcaccgtcgcatgcgcggcggtatcctgcccctccttattccactgatcgccgcggcgattggcgccgtgcccggaattgcatccgtggccttgcaggcgcagagacactgattaaaaacaagttgcatgtggaaaaatcaaaataaaaagtctggactctcacgctcgcttggtcctgtaactattttgtagaatggaagacatcaactttgcgtctctggccccgcgacacggctcgcgcccgttcatgggaaactggcaagatatcggcaccagcaatatgagcggtggcgccttcagctggggctcgctgtggagcggcattaaaaatttcggttccaccgttaagaactatggcagcaaggcctggaacagcagcacaggccagatgctgagggataagttgaaagagcaaaatttccaacaaaaggtggtagatggcctggcctctggcattagcggggtggtggacctggccaaccaggcagtgcaaaataagattaacagtaagcttgatccccgccctcccgtagaggagcctccaccggccgtggagacagtgtctccagaggggcgtggcgaaaagcgtccgcgccccgacagggaagaaactctggtgacgcaaatagacgagcctccctcgtacgaggaggcactaaagcaaggcctgcccaccacccgtcccatcgcgcccatggctaccggagtgctgggccagcacacacccgtaacgctggacctgcctccccccgccgacacccagcagaaacctgtgctgccaggcccgaccgccgttgttgtaacccgtcctagccgcgcgtccctgcgccgcgccgccagcggtccgcgatcgttgcggcccgtagccagtggcaactggcaaagcacactgaacagcatcgtgggtctgggggtgcaatccctgaagcgccgacgatgcttctgatagctaacgtgtcgtatgtgtgtcatgtatgcgtccatgtcgccgccagaggagctgctgagccgccgcgcgcccgctttccaagatggctaccccttcgatgatgccgcagtggtcttacatgcacatctcgggccaggacgcctcggagtacctgagccccgggctggtgcagtttgcccgcgccaccgagacgtacttcagcctgaataacaagtttagaaaccccacggtggcgcctacgcacgacgtgaccacagaccggtcccagcgtttgacgctgcggttcatccctgtggaccgtgaggatactgcgtactcgtacaaggcgcggttcaccctagctgtgggtgataaccgtgtgctggacatggcttccacgtactttgacatccgcggcgtgctggacaggggccctacttttaagccctactctggcactgcctacaacgccctggctcccaagggtgccccaaatccttgcgaatgggatgaagctgctactgctcttgaaataaacctagaagaagaggacgatgacaacgaagacgaagtagacgagcaagctgagcagcaaaaaactcacgtatttgggcaggcgccttattctggtataaatattacaaaggagggtattcaaataggtgtcgaaggtcaaacacctaaatatgccgataaaacatttcaacctgaacctcaaataggagaatctcagtggtacgaaacagaaattaatcatgcagctgggagagtcctaaaaaagactaccccaatgaaaccatgttacggttcatatgcaaaacccacaaatgaaaatggagggcaaggcattcttgtaaagcaacaaaatggaaagctagaaagtcaagtggaaatgcaatttttctcaactactgaggcagccgcaggcaatggtgataacttgactcctaaagtggtattgtacagtgaagatgtagatatagaaaccccagacactcatatttcttacatgcccactattaaggaaggtaactcacgagaactaatgggccaacaatctatgcccaacaggcctaattacattgcttttagggacaattttattggtctaatgtattacaacagcacgggtaatatgggtgttctggcgggccaagcatcgcagttgaatgctgttgtagatttgcaagacagaaacacagagctttcataccagcttttgcttgattccattggtgatagaaccaggtacttttctatgtggaatcaggctgttgacagctatgatccagatgttagaattattgaaaatcatggaactgaagatgaacttccaaattactgctttccactgggaggtgtgattaatacagagactcttaccaaggtaaaacctaaaacaggtcaggaaaatggatgggaaaaagatgctacagaattttcagataaaaatgaaataagagttggaaataattttgccatggaaatcaatctaaatgccaacctgtggagaaatttcctgtactccaacatagcgctgtatttgcccgacaagctaaagtacagtccttccaacgtaaaaatttctgataacccaaacacctacgactacatgaacaagcgagtggtggctcccgggctagtggactgctacattaaccttggagcacgctggtcccttgactatatggacaacgtcaacccatttaaccaccaccgcaatgctggcctgcgctaccgctcaatgttgctgggcaatggtcgctatgtgcccttccacatccaggtgcctcagaagttctttgccattaaaaacctccttctcctgccgggctcatacacctacgagtggaacttcaggaaggatgttaacatggttctgcagagctccctaggaaatgacctaagggttgacggagccagcattaagtttgatagcatttgcctttacgccaccttcttccccatggcccacaacaccgcctccacgcttgaggccatgcttagaaacgacaccaacgaccagtcctttaacgactatctctccgccgccaacatgctctaccctatacccgccaacgctaccaacgtgcccatatccatcccctcccgcaactgggcggctttccgcggctgggccttcacgcgccttaagactaaggaaaccccatcactgggctcgggctacgacccttattacacctactctggctctataccctacctagatggaaccttttacctcaaccacacctttaagaaggtggccattacctttgactcttctgtcagctggcctggcaatgaccgcctgcttacccccaacgagtttgaaattaagcgctcagttgacggggagggttacaacgttgcccagtgtaacatgaccaaagactggttcctggtacaaatgctagctaactataacattggctaccagggcttctatatcccagagagctacaaggaccgcatgtactccttctttagaaacttccagcccatgagccgtcaggtggtggatgatactaaatacaaggactaccaacaggtgggcatcctacaccaacacaacaactctggatttgttggctaccttgcccccaccatgcgcgaaggacaggcctaccctgctaacttcccctatccgcttataggcaagaccgcagttgacagcattacccagaaaaagtttctttgcgatcgcaccctttggcgcatcccattctccagtaactttatgtccatgggcgcactcacagacctgggccaaaaccttctctacgccaactccgcccacgcgctagacatgacttttgaggtggatcccatggacgagcccacccttctttatgttttgtttgaagtctttgacgtggtccgtgtgcaccagccgcaccgcggcgtcatcgaaaccgtgtacctgcgcacgcccttctcggccggcaacgccacaacataaagaagcaagcaacatcaacaacagctgccgccatgggctccagtgagcaggaactgaaagccattgtcaaagatcttggttgtgggccatattttttgggcacctatgacaagcgctttccaggctttgtttctccacacaagctcgcctgcgccatagtcaatacggccggtcgcgagactgggggcgtacactggatggcctttgcctggaacccgcactcaaaaacatgctacctctttgagccctttggcttttctgaccagcgactcaagcaggtttaccagtttgagtacgagtcactcctgcgccgtagcgccattgcttcttcccccgaccgctgtataacgctggaaaagtccacccaaagcgtacaggggcccaactcggccgcctgtggactattctgctgcatgtttctccacgcctttgccaactggccccaaactcccatggatcacaaccccaccatgaaccttattaccggggtacccaactccatgctcaacagtccccaggtacagcccaccctgcgtcgcaaccaggaacagctctacagcttcctggagcgccactcgccctacttccgcagccacagtgcgcagattaggagcgccacttctttttgtcacttgaaaaacatgtaaaaataatgtactagagacactttcaataaaggcaaatgcttttatttgtacactctcgggtgattatttacccccacccttgccgtctgcgccgtttaaaaatcaaaggggttctgccgcgcatcgctatgcgccactggcagggacacgttgcgatactggtgtttagtgctccacttaaactcaggcacaaccatccgcggcagctcggtgaagttttcactccacaggctgcgcaccatcaccaacgcgtttagcaggtcgggcgccgatatcttgaagtcgcagttggggcctccgccctgcgcgcgcgagttgcgatacacagggttgcagcactggaacactatcagcgccgggtggtgcacgctggccagcacgctcttgtcggagatcagatccgcgtccaggtcctccgcgttgctcagggcgaacggagtcaactttggtagctgccttcccaaaaagggcgcgtgcccaggctttgagttgcactcgcaccgtagtggcatcaaaaggtgaccgtgcccggtctgggcgttaggatacagcgcctgcataaaagccttgatctgcttaaaagccacctgagcctttgcgccttcagagaagaacatgccgcaagacttgccggaaaactgattggccggacaggccgcgtcgtgcacgcagcaccttgcgtcggtgttggagatctgcaccacatttcggccccaccggttcttcacgatcttggccttgctagactgctccttcagcgcgcgctgcccgttttcgctcgtcacatccatttcaatcacgtgctccttatttatcataatgcttccgtgtagacacttaagctcgccttcgatctcagcgcagcggtgcagccacaacgcgcagcccgtgggctcgtgatgcttgtaggtcacctctgcaaacgactgcaggtacgcctgcaggaatcgccccatcatcgtcacaaaggtcttgttgctggtgaaggtcagctgcaacccgcggtgctcctcgttcagccaggtcttgcatacggccgccagagcttccacttggtcaggcagtagtttgaagttcgcctttagatcgttatccacgtggtacttgtccatcagcgcgcgcgcagcctccatgcccttctcccacgcagacacgatcggcacactcagcgggttcatcaccgtaatttcactttccgcttcgctgggctcttcctcttcctcttgcgtccgcataccacgcgccactgggtcgtcttcattcagccgccgcactgtgcgcttacctcctttgccatgcttgattagcaccggtgggttgctgaaacccaccatttgtagcgccacatcttctctttcttcctcgctgtccacgattacctctggtgatggcgggcgctcgggcttgggagaagggcgcttctttttcttcttgggcgcaatggccaaatccgccgccgaggtcgatggccgcgggctgggtgtgcgcggcaccagcgcgtcttgtgatgagtcttcctcgtcctcggactcgatacgccgcctcatccgcttttttgggggcgcccggggaggcggcggcgacggggacggggacgacacgtcctccatggttgggggacgtcgcgccgcaccgcgtccgcgctcgggggtggtttcgcgctgctcctcttcccgactggccatttccttctcctataggcagaaaaagatcatggagtcagtcgagaagaaggacagcctaaccgccccctctgagttcgccaccaccgcctccaccgatgccgccaacgcgcctaccaccttccccgtcgaggcacccccgcttgaggaggaggaagtgattatcgagcaggacccaggttttgtaagcgaagacgacgaggaccgctcagtaccaacagaggataaaaagcaagaccaggacaacgcagaggcaaacgaggaacaagtcgggcggggggacgaaaggcatggcgactacctagatgtgggagacgacgtgctgttgaagcatctgcagcgccagtgcgccattatctgcgacgcgttgcaagagcgcagcgatgtgcccctcgccatagcggatgtcagccttgcctacgaacgccacctattctcaccgcgcgtaccccccaaacgccaagaaaacggcacatgcgagcccaacccgcgcctcaacttctaccccgtatttgccgtgccagaggtgcttgccacctatcacatctttttccaaaactgcaagatacccctatcctgccgtgccaaccgcagccgagcggacaagcagctggccttgcggcagggcgctgtcatacctgatatcgcctcgctcaacgaagtgccaaaaatctttgagggtcttggacgcgacgagaagcgcgcggcaaacgctctgcaacaggaaaacagcgaaaatgaaagtcactctggagtgttggtggaactcgagggtgacaacgcgcgcctagccgtactaaaacgcagcatcgaggtcacccactttgcctacccggcacttaacctaccccccaaggtcatgagcacagtcatgagtgagctgatcgtgcgccgtgcgcagcccctggagagggatgcaaatttgcaagaacaaacagaggagggcctacccgcagttggcgacgagcagctagcgcgctggcttcaaacgcgcgagcctgccgacttggaggagcgacgcaaactaatgatggccgcagtgctcgttaccgtggagcttgagtgcatgcagcggttctttgctgacccggagatgcagcgcaagctagaggaaacattgcactacacctttcgacagggctacgtacgccaggcctgcaagatctccaacgtggagctctgcaacctggtctcctaccttggaattttgcacgaaaaccgccttgggcaaaacgtgcttcattccacgctcaagggcgaggcgcgccgcgactacgtccgcgactgcgtttacttatttctatgctacacctggcagacggccatgggcgtttggcagcagtgcttggaggagtgcaacctcaaggagctgcagaaactgctaaagcaaaacttgaaggacctatggacggccttcaacgagcgctccgtggccgcgcacctggcggacatcattttccccgaacgcctgcttaaaaccctgcaacagggtctgccagacttcaccagtcaaagcatgttgcagaactttaggaactttatcctagagcgctcaggaatcttgcccgccacctgctgtgcacttcctagcgactttgtgcccattaagtaccgcgaatgccctccgccgctttggggccactgctaccttctgcagctagccaactaccttgcctaccactctgacataatggaagacgtgagcggtgacggtctactggagtgtcactgtcgctgcaacctatgcaccccgcaccgctccctggtttgcaattcgcagctgcttaacgaaagtcaaattatcggtacctttgagctgcagggtccctcgcctgacgaaaagtccgcggctccggggttgaaactcactccggggctgtggacgtcggcttaccttcgcaaatttgtacctgaggactaccacgcccacgagattaggttctacgaagaccaatcccgcccgcctaatgcggagcttaccgcctgcgtcattacccagggccacattcttggccaattgcaagccatcaacaaagcccgccaagagtttctgctacgaaagggacggggggtttacttggacccccagtccggcgaggagctcaacccaatccccccgccgccgcagccctatcagcagcagccgcgggcccttgcttcccaggatggcacccaaaaagaagctgcagctgccgccgccacccacggacgaggaggaatactgggacagtcaggcagaggaggttttggacgaggaggaggaggacatgatggaagactgggagagcctagacgaggaagcttccgaggtcgaagaggtgtcagacgaaacaccgtcaccctcggtcgcattcccctcgccggcgccccagaaatcggcaaccggttccagcatggctacaacctccgctcctcaggcgccgccggcactgcccgttcgccgacccaaccgtagatgggacaccactggaaccagggccggtaagtccaagcagccgccgccgttagcccaagagcaacaacagcgccaaggctaccgctcatggcgcgggcacaagaacgccatagttgcttgcttgcaagactgtgggggcaacatctccttcgcccgccgctttcttctctaccatcacggcgtggccttcccccgtaacatcctgcattactaccgtcatctctacagcccatactgcaccggcggcagcggcagcaacagcagcggccacacagaagcaaaggcgaccggatagcaagactctgacaaagcccaagaaatccacagcggcggcagcagcaggaggaggagcgctgcgtctggcgcccaacgaacccgtatcgacccgcgagcttagaaacaggatttttcccactctgtatgctatatttcaacagagcaggggccaagaacaagagctgaaaataaaaaacaggtctctgcgatccctcacccgcagctgcctgtatcacaaaagcgaagatcagcttcggcgcacgctggaagacgcggaggctctcttcagtaaatactgcgcgctgactcttaaggactagtttcgcgccctttctcaaatttaagcgcgaaaactacgtcatctccagcggccacacccggcgccagcacctgttgtcagcgccattatgagcaaggaaattcccacgccctacatgtggagttaccagccacaaatgggacttgcggctggagctgcccaagactactcaacccgaataaactacatgagcgcgggaccccacatgatatcccgggtcaacggaatacgcgcccaccgaaaccgaattctcctggaacaggcggctattaccaccacacctcgtaataaccttaatccccgtagttggcccgctgccctggtgtaccaggaaagtcccgctcccaccactgtggtacttcccagagacgcccaggccgaagttcagatgactaactcaggggcgcagcttgcgggcggctttcgtcacagggtgcggtcgcccgggcagggtataactcacctgacaatcagagggcgaggtattcagctcaacgacgagtcggtgagctcctcgcttggtctccgtccggacgggacatttcagatcggcggcgccggccgctcttcattcacgcctcgtcaggcaatcctaactctgcagacctcgtcctctgagccgcgctctggaggcattggaactctgcaatttattgaggagtttgtgccatcggtctactttaaccccttctcgggacctcccggccactatccggatcaatttattcctaactttgacgcggtaaaggactcggcggacggctacgactgaatgttaagtggagaggcagagcaactgcgcctgaaacacctggtccactgtcgccgccacaagtgctttgcccgcgactccggtgagttttgctactttgaattgcccgaggatcatatcgagggcccggcgcacggcgtccggcttaccgcccagggagagcttgcccgtagcctgattcgggagtttacccagcgccccctgctagttgagcgggacaggggaccctgtgttctcactgtgatttgcaactgtcctaaccctggattacatcaagatctttgttgccatctctgtgctgagtataataaatacagaaattaaaatatactggggctcctatcgccatcctgtaaacgccaccgtcttcacccgcccaagcaaaccaaggcgaaccttacctggtacttttaacatctctccctctgtgatttacaacagtttcaacccagacggagtgagtctacgagagaacctctccgagctcagctactccatcagaaaaaacaccaccctccttacctgccgggaacgtacgagtgcgtcaccggccgctgcaccacacctaccgcctgaccgtaaaccagactttttccggacagacctcaataactctgtttaccagaacaggaggtgagcttagaaaacccttagggtattaggccaaaggcgcagctactgtggggtttatgaacaattcaagcaactctacgggctattctaattcaggtttctctagaatcggggttggggttattctctgtcttgtgattctctttattcttatactaacgcttctctgcctaaggctcgccgcctgctgtgtgcacatttgcatttattgtcagctttttaaacgctggggtcgccacccaagatgattaggtacataatcctaggtttactcacccttgcgtcagcccacggtaccacccaaaaggtggattttaaggagccagcctgtaatgttacattcgcagctgaagctaatgagtgcaccactcttataaaatgcaccacagaacatgaaaagctgcttattcgccacaaaaacaaaattggcaagtatgctgtttatgctatttggcagccaggtgacactacagagtataatgttacagttttccagggtaaaagtcataaaacttttatgtatacttttccattttatgaaatgtgcgacattaccatgtacatgagcaaacagtataagttgtggcccccacaaaattgtgtggaaaacactggcactttctgctgcactgctatgctaattacagtgctcgctttggtctgtaccctactctatattaaatacaaaagcagacgcagctttattgaggaaaagaaaatgccttaatttactaagttacaaagctaatgtcaccactaactgctttactcgctgcttgcaaaacaaattcaaaaagttagcattataattagaataggatttaaaccccccggtcatttcctgctcaataccattcccctgaacaattgactctatgtgggatatgctccagcgctacaaccttgaagtcaggcttcctggatgtcagcatctgactttggccagcacctgtcccgcggatttgttccagtccaactacagcgacccaccctaacagagatgaccaacacaaccaacgcggccgccgctaccggacttacatctaccacaaatacaccccaagtttctgcctttgtcaataactgggataacttgggcatgtggtggttctccatagcgcttatgtttgtatgccttattattatgtggctcatctgctgcctaaagcgcaaacgcgcccgaccacccatctatagtcccatcattgtgctacacccaaacaatgatggaatccatagattggacggactgaaacacatgttcttttctcttacagtatgattaaatgagacatgattcctcgagtttttatattactgacccttgttgcgctttttttgtgcgtgctccacattggctgcggtttctcacatcgaagtagactgcattccagccttcacagtctatttgctttacggatttgtcaccctcacgctcatctgcagcctcatcactgtggtcatcgcctttatccagtgcattgactgggtctgtgtgcgctttgcatatctcagacaccatccccagtacagggacaggactatagctgagcttcttagaattctttaattatgaaatttactgtgacttttctgctgattatttgcaccctatctgcgttttgttccccgacctccaagcctcaaagacatatatcatgcagattcactcgtatatggaatattccaagttgctacaatgaaaaaagcgatctttccgaagcctggttatatgcaatcatctctgttatggtgttctgcagtaccatcttagccctagctatatatccctaccttgacattggctggaacgcaatagatgccatgaaccacccaactttccccgcgcccgctatgcttccactgcaacaagttgttgccggcggctttgtcccagccaatcagcctcgcccaccttctcccacccccactgaaatcagctactttaatctaacaggaggagatgactgacaccctagatctagaaatggacggaattattacagagcagcgcctgctagaaagacgcagggcagcggccgagcaacagcgcatgaatcaagagctccaagacatggttaacttgcaccagtgcaaaaggggtatcttttgtctggtaaagcaggccaaagtcacctacgacagtaataccaccggacaccgccttagctacaagttgccaaccaagcgtcagaaattggtggtcatggtgggagaaaagcccattaccataactcagcactcggtagaaaccgaaggctgcattcactcaccttgtcaaggacctgaggatctctgcacccttattaagaccctgtgcggtctcaaagatcttattccctttaactaataaaaaaaaataataaagcatcacttacttaaaatcagttagcaaatttctgtccagtttattcagcagcacctccttgccctcctcccagctctggtattgcagcttcctcctggctgcaaactttctccacaatctaaatggaatgtcagtttcctcctgttcctgtccatccgcacccactatcttcatgttgttgcagatgaagcgcgcaagaccgtctgaagataccttcaaccccgtgtatccatatgacacggaaaccggtcctccaactgtgccttttcttactcctccctttgtatcccccaatgggtttcaagagagtccccctggggtactctctttgcgcctatccgaacctctagttacctccaatggcatgcttgcgctcaaaatgggcaacggcctctctctggacgaggccggcaaccttacctcccaaaatgtaaccactgtgagcccacctctcaaaaaaaccaagtcaaacataaacctggaaatatctgcacccctcacagttacctcagaagccctaactgtggctgccgccgcacctctaatggtcgcgggcaacacactcaccatgcaatcacaggccccgctaaccgtgcacgactccaaacttagcattgccacccaaggacccctcacagtgtcagaaggaaagctagccctgcaaacatcaggccccctcaccaccaccgatagcagtacccttactatcactgcctcaccccctctaactactgccactggtagcttgggcattgacttgaaagagcccatttatacacaaaatggaaaactaggactaaagtacggggctcctttgcatgtaacagacgacctaaacactttgaccgtagcaactggtccaggtgtgactattaataatacttccttgcaaactaaagttactggagccttgggttttgattcacaaggcaatatgcaacttaatgtagcaggaggactaaggattgattctcaaaacagacgccttatacttgatgttagttatccgtttgatgctcaaaaccaactaaatctaagactaggacagggccctctttttataaactcagcccacaacttggatattaactacaacaaaggcctttacttgtttacagcttcaaacaattccaaaaagcttgaggttaacctaagcactgccaaggggttgatgtttgacgctacagccatagccattaatgcaggagatgggcttgaatttggttcacctaatgcaccaaacacaaatcccctcaaaacaaaaattggccatggcctagaatttgattcaaacaaggctatggttcctaaactaggaactggccttagttttgacagcacaggtgccattacagtaggaaacaaaaataatgataagctaactttgtggaccacaccagctccatctcctaactgtagactaaatgcagagaaagatgctaaactcactttggtcttaacaaaatgtggcagtcaaatacttgctacagtttcagttttggctgttaaaggcagtttggctccaatatctggaacagttcaaagtgctcatcttattataagatttgacgaaaatggagtgctactaaacaattccttcctggacccagaatattggaactttagaaatggagatcttactgaaggcacagcctatacaaacgctgttggatttatgcctaacctatcagcttatccaaaatctcacggtaaaactgccaaaagtaacattgtcagtcaagtttacttaaacggagacaaaactaaacctgtaacactaaccattacactaaacggtacacaggaaacaggagacacaactccaagtgcatactctatgtcattttcatgggactggtctggccacaactacattaatgaaatatttgccacatcctcttacactttttcatacattgcccaagaataaagaatcgtttgtgttatgtttcaacgtgtttatttttcaattgcagaaaatttcaagtcatttttcattcagtagtatagccccaccaccacatagcttatacagatcaccgtaccttaatcaaactcacagaaccctagtattcaacctgccacctccctcccaacacacagagtacacagtcctttctccccggctggccttaaaaagcatcatatcatgggtaacagacatattcttaggtgttatattccacacggtttcctgtcgagccaaacgctcatcagtgatattaataaactccccgggcagctcacttaagttcatgtcgctgtccagctgctgagccacaggctgctgtccaacttgcggttgcttaacgggcggcgaaggagaagtccacgcctacatgggggtagagtcataatcgtgcatcaggatagggcggtggtgctgcagcagcgcgcgaataaactgctgccgccgccgctccgtcctgcaggaatacaacatggcagtggtctcctcagcgatgattcgcaccgcccgcagcataaggcgccttgtcctccgggcacagcagcgcaccctgatctcacttaaatcagcacagtaactgcagcacagcaccacaatattgttcaaaatcccacagtgcaaggcgctgtatccaaagctcatggcggggaccacagaacccacgtggccatcataccacaagcgcaggtagattaagtggcgacccctcataaacacgctggacataaacattacctcttttggcatgttgtaattcaccacctcccggtaccatataaacctctgattaaacatggcgccatccaccaccatcctaaaccagctggccaaaacctgcccgccggctatacactgcagggaaccgggactggaacaatgacagtggagagcccaggactcgtaaccatggatcatcatgctcgtcatgatatcaatgttggcacaacacaggcacacgtgcatacacttcctcaggattacaagctcctcccgcgttagaaccatatcccagggaacaacccattcctgaatcagcgtaaatcccacactgcagggaagacctcgcacgtaactcacgttgtgcattgtcaaagtgttacattcgggcagcagcggatgatcctccagtatggtagcgcgggtttctgtctcaaaaggaggtagacgatccctactgtacggagtgcgccgagacaaccgagatcgtgttggtcgtagtgtcatgccaaatggaacgccggacgtagtcatatttcctgaagcaaaaccaggtgcgggcgtgacaaacagatctgcgtctccggtctcgccgcttagatcgctctgtgtagtagttgtagtatatccactctctcaaagcatccaggcgccccctggcttcgggttctatgtaaactccttcatgcgccgctgccctgataacatccaccaccgcagaataagccacacccagccaacctacacattcgttctgcgagtcacacacgggaggagcgggaagagctggaagaaccatgttttttttttttattccaaaagattatccaaaacctcaaaatgaagatctattaagtgaacgcgctcccctccggtggcgtggtcaaactctacagccaaagaacagataatggcatttgtaagatgttgcacaatggcttccaaaaggcaaacggccctcacgtccaagtggacgtaaaggctaaacccttcagggtgaatctcctctataaacattccagcaccttcaaccatgcccaaataattctcatctcgccaccttctcaatatatctctaagcaaatcccgaatattaagtccggccattgtaaaaatctgctccagagcgccctccaccttcagcctcaagcagcgaatcatgattgcaaaaattcaggttcctcacagacctgtataagattcaaaagcggaacattaacaaaaataccgcgatcccgtaggtcccttcgcagggccagctgaacataatcgtgcaggtctgcacggaccagcgcggccacttccccgccaggaaccatgacaaaagaacccacactgattatgacacgcatactcggagctatgctaaccagcgtagccccgatgtaagcttgttgcatgggcggcgatataaaatgcaaggtgctgctcaaaaaatcaggcaaagcctcgcgcaaaaaagaaagcacatcgtagtcatgctcatgcagataaaggcaggtaagctccggaaccaccacagaaaaagacaccatttttctctcaaacatgtctgcgggtttctgcataaacacaaaataaaataacaaaaaaacatttaaacattagaagcctgtcttacaacaggaaaaacaacccttataagcataagacggactacggccatgccggcgtgaccgtaaaaaaactggtcaccgtgattaaaaagcaccaccgacagctcctcggtcatgtccggagtcataatgtaagactcggtaaacacatcaggttgattcacatcggtcagtgctaaaaagcgaccgaaatagcccgggggaatacatacccgcaggcgtagagacaacattacagcccccataggaggtataacaaaattaataggagagaaaaacacataaacacctgaaaaaccctcctgcctaggcaaaatagcaccctcccgctccagaacaacatacagcgcttccacagcggcagccataacagtcagccttaccagtaaaaaagaaaacctattaaaaaaacaccactcgacacggcaccagctcaatcagtcacagtgtaaaaaagggccaagtgcagagcgagtatatataggactaaaaaatgacgtaacggttaaagtccacaaaaaacacccagaaaaccgcacgcgaacctacgcccagaaacgaaagccaaaaaacccacaacttcctcaaatcgtcacttccgttttcccacgttacgtcacttcccattttaagaaaactacaattcccaacacatacaagttactccgccctaaaacctacgtcacccgccccgttcccacgccccgcgccacgtcacaaactccaccccctcattatcatattggcttcaatccaaaataaggtatattattgatgatgatttaaa

SEQ ID NO: 17 - DNA, 35776 bp, Adenovirus C6
  MISC_FEATURE (1)..(35776): Complete Genome
ttttaaatcatcatcaataatataccttattttggattgaagccaatatgataatgagggggtggagtttgtgacgtggcgcggggcgtgggaacggggcgggtgacgtagtagtgtggcggaagtgtgatgttgtaagtgtggcggaacacatgtaagcgccggatgtggtaaaagtgacgtttttggtgtgcgccggtgtacacgggaagtgacaattttcgcgcggttttaggcggatgttgtagtaaatttgggcgtaaccaagtaatatttggccattttcgcgggaaaactgaataagaggaagtgaaatctgaataattctgtgttactcatagcgcgtaatatttgtctagggccgcggggactttgaccgtttacgtggagactcgcccaggtgtttttctcaggtgttttccgcgttccgggtcaaagttggcgttttattattatagtcagctgacgcgcagtgtatttatacccggtgagttcctcaagaggccactcttgagtgccagcgagtagagttttctcctccgagccgctccgacaccgggactgaaaatgagacatattatctgccacggaggtgttattaccgaagaaatggccgccagtcttttggaccagctgatcgaagaggtactggctgataatcttccacctcctagccattttgaaccacctacccttcacgaactgtatgatttagacgtgacggcccccgaagatcccaacgaggaggcggtttcgcagatttttcccgagtctgtaatgttggcggtgcaggaagggattgacttattcacttttccgccggcgcccggttctccggagccgcctcacctttcccggcagcccgagcagccggagcagagagccttgggtccggtttctatgccaaaccttgtgccggaggtgatcgatcttacctgccacgaggctggctttccacccagtgacgacgaggatgaagagggtgaggagtttgtgttagattatgtggagcaccccgggcacggttgcaggtcttgtcattatcaccggaggaatacgggggacccagatattatgtgttcgctttgctatatgaggacctgtggcatgtttgtctacagtaagtgaaaaattatgggcagtgggtgatagagtggtgggtttggtgtggtaattttttttttaatttttacagttttgtggtttaaagaattttgtattgtgattttttaaaaggtcctgtgtctgaacctgagcctgagcccgagccagaaccggagcctgcaagacctacccggcgtcctaaattggtgcctgctatcctgagacgcccgacatcacctgtgtctagagaatgcaatagtagtacggatagctgtgactccggtccttctaacacacctcctgagatacacccggtggtcccgctgtgccccattaaaccagttgccgtgagagttggtgggcgtcgccaggctgtggaatgtatcgaggacttgcttaacgagtctgggcaacctttggacttgagctgtaaacgccccaggccataaggtgtaaacctgtgattgcgtgtgtggttaacgcctttgtttgctgaatgagttgatgtaagtttaataaagggtgagataatgtttaacttgcatggcgtgttaaatggggcggggcttaaagggtatataatgcgccgtgggctaatcttggttacatctgacctcatggaggcttgggagtgtttggaagatttttctgctgtgcgtaacttgctggaacagagctctaacagtacctcttggttttggaggtttctgtggggctcctcccaggcaaagttagtctgcagaattaaggaggattacaagtgggaatttgaagagcttttgaaatcctgtggtgagctgtttgattctttgaatctgggtcaccaggcgcttttccaagagaaggtcatcaagactttggatttttccacaccggggcgcgctgcggctgctgttgcttttttgagttttataaaggataaatggagcgaagaaacccatctgagcggggggtacctgctggattttctggccatgcatctgtggagagcggtggtgagacacaagaatcgcctgctactgttgtcttccgtccgcccggcaataataccgacggaggagcaacagcaggaggaagccaggcggcggcggcggcaggagcagagcccatggaacccgagagccggcctggaccctcgggaatgaatgttgtacaggtggctgaactgtttccagaactgagacgcattttaaccattaacgaggatgggcaggggctaaagggggtaaagagggagcggggggcttctgaggctacagaggaggctaggaatctaacttttagcttaatgaccagacaccgtcctgagtgtgttacttttcagcagattaaggataattgcgctaatgagcttgatctgctggcgcagaagtattccatagagcagctgaccacttactggctgcagccaggggatgattttgaggaggctattagggtatatgcaaaggtggcacttaggccagattgcaagtacaagattagcaaacttgtaaatatcaggaattgttgctacatttctgggaacggggccgaggtggagatagatacggaggatagggtggcctttagatgtagcatgataaatatgtggccgggggtgcttggcatggacggggtggttattatgaatgtgaggtttactggtcccaattttagcggtacggttttcctggccaataccaatcttatcctacacggtgtaagcttctatgggtttaacaatacctgtgtggaagcctggaccgatgtaagggttcggggctgtgccttttactgctgctggaagggggtggtgtgtcgccccaaaagcagggcttcaattaagaaatgcctgtttgaaaggtgtaccttgggtatcctgtctgagggtaactccagggtgcgccacaatgtggcctccgactgtggttgctttatgctagtgaaaagcgtggctgtgattaagcataacatggtgtgtggcaactgcgaggacagggcctctcagatgctgacctgctcggacggcaactgtcacttgctgaagaccattcacgtagccagccactctcgcaaggcctggccagtgtttgagcacaacatactgacccgctgttccttgcatttgggtaacaggaggggggtgttcctaccttaccaatgcaatttgagtcacactaagatattgcttgagcccgagagcatgtccaaggtgaacctgaacggggtgtttgacatgaccatgaagatctggaaggtgctgaggtacgatgagacccgcaccaggtgcagaccctgcgagtgtggcggtaaacatattaggaaccagcctgtgatgctggatgtgaccgaggagctgaggcccgatcacttggtgctggcctgcacccgcgctgagtttggctctagcgatgaagatacagattgaggtactgaaatgtgtgggcgtggcttaagggtgggaaagaatatataaggtgggggtctcatgtagttttgtatctgttttgcagcagccgccgccatgagcgccaactcgtttgatggaagcattgtgagctcatatttgacaacgcgcatgcccccatgggccggggtgcgtcagaatgtgatgggctccagcattgatggtcgccccgtcctgcccgcaaactctactaccttgacctacgagaccgtgtctggaacgccgttggagactgcagcctccgccgccgcttcagccgctgcagccaccgcccgcgggattgtgactgactttgctttcctgagcccgcttgcaagcagtgcagcttcccgttcatccgcccgcgatgacaagttgacggctcttttggcacaattggattctttgacccgggaacttaatgtcgtttctcagcagctgttggatctgcgccagcaggtttctgccctgaaggcttcctcccctcccaatgcggtttaaaacataaataaaaaccagactctgtttggatttggatcaagcaagtgtcttgctgtctttatttaggggttttgcgcgcgcggtaggcccgggaccagcggtctcggtcgttgagggtcctgtgtattttttccaggacgtggtaaaggtgactctggatgttcagatacatgggcataagcccgtctctggggtggaggtagcaccactgcagagcttcatgctgcggggtggtgttgtagatgatccagtcgtagcaggagcgctgggcgtggtgcctaaaaatgtctttcagtagcaagctgattgccaggggcaggcccttggtgtaagtgtttacaaagcggttaagctgggatgggtgcatacgtggggatatgagatgcatcttggactgtatttttaggttggctatgttcccagccatatccctccggggattcatgttgtgcagaaccaccagcacagtgtatccggtgcacttgggaaatttgtcatgtagcttagaaggaaatgcgtggaagaacttggagacgcccttgtgacctccaagattttccatgcattcgtccataatgatggcaatgggcccacgggcggcggcctgggcgaagatatttctgggatcactaacgtcatagttgtgttccaggatgagatcgtcataggccatttttacaaagcgcgggcggagggtgccagactgcggtataatggttccatccggcccaggggcgtagttaccctcacagatttgcatttcccacgctttgagttcagatggggggatcatgtctacctgcggggcgatgaagaaaaccgtttccggggtaggggagatcagctgggaagaaagcaggttcctaagcagctgcgacttaccgcagccggtgggcccgtaaatcacacctattaccggctgcaactggtagttaagagagctgcagctgccgtcatccctgagcaggggggccacttcgttaagcatgtccctgacttgcatgttttccctgaccaaatccgccagaaggcgctcgccgcccagcgatagcagttcttgcaaggaagcaaagtttttcaacggtttgaggccgtccgccgtaggcatgcttttgagcgtttgaccaagcagttccaggcggtcccacagctcggtcacgtgctctacggcatctcgatccagcatatctcctcgtttcgcgggttggggcggctttcgctgtacggcagtagtcggtgctcgtccagacgggccagggtcatgtctttccacgggcgcagggtcctcgtcagcgtagtctgggtcacggtgaaggggtgcgctccgggttgcgcgctggccagggtgcgcttgaggctggtcctgctggtgctgaagcgctgccggtcttcgccctgcgcgtcggccaggtagcatttgaccatggtgtcatagtccagcccctccgcggcgtggcccttggcgcgcagcttgcccttggaggaggcgccgcacgaggggcagtgcagacttttaagggcgtagagcttgggcgcgagaaataccgattccggggagtaggcatccgcgccgcaggccccgcagacggtctcgcattccacgagccaggtgagctctggccgttcggggtcaaaaaccaggtttcccccatgctttttgatgcgtttcttacctctggtttccatgagccggtgtccacgctcggtgacgaaaaggctgtccgtgtccccgtatacagacttgagaggcctgtcctcgagcggtgttccgcggtcctcctcgtatagaaactcggaccactctgagacgaaggctcgcgtccaggccagcacgaaggaggctaagtgggaggggtagcggtcgttgtccactagggggtccactcgctccagggtgtgaagacacatgtcgccctcttcggcatcaaggaaggtgattggtttataggtgtaggccacgtgaccgggtgttcctgaaggggggctataaaagggggtgggggcgcgttcgtcctcactctcttccgcatcgctgtctgcgagggccagctgttggggtgagtactccctctcaaaagcgggcatgacttctgcgctaagattgtcagtttccaaaaacgaggaggatttgatattcacctggcccgcggtgatgcctttgagggtggccgcgtccatctggtcagaaaagacaatctttttgttgtcaagcttggtggcaaacgacccgtagagggcgttggacagcaacttggcgatggagcgcagggtttggtttttgtcgcgatcggcgcgctccttggccgcgatgtttagctgcacgtattcgcgcgcaacgcaccgccattcgggaaagacggtggtgcgctcgtcgggcactaggtgcacgcgccaaccgcggttgtgcagggtgacaaggtcaacgctggtggctacctctccgcgtaggcgctcgttggtccagcagaggcggccgcccttgcgcgagcagaatggcggtagtgggtctagctgcgtctcgtccggggggtctgcgtccacggtaaagaccccgggcagcaggcgcgcgtcgaagtagtctatcttgcatccttgcaagtctagcgcctgctgccatgcgcgggcggcaagcgcgcgctcgtatgggttgagtgggggaccccatggcatggggtgggtgagcgcggaggcgtacatgccgcaaatgtcgtaaacgtagaggggctctctgagtattccaagatatgtagggtagcatcttccaccgcggatgctggcgcgcacgtaatcgtatagttcgtgcgagggagcgaggaggtcgggaccgaggttgctacgggcgggctgctctgctcggaagactatctgcctgaagatggcatgtgagttggatgatatggttggacgctggaagacgttgaagctggcgtctgtgagacctaccgcgtcacgcacgaaggaggcgtaggagtcgcgcagcttgttgaccagctcggcggtgacctgcacgtctagggcgcagtagtccagggtttccttgatgatgtcatacttatcctgtcccttttttttccacagctcgcggttgaggacaaactcttcgcggtctttccagtactcttggatcggaaacccgtcggcctccgaacggtaagagcctagcatgtagaactggttgacggcctggtaggcgcagcatcccttttctacgggtagcgcgtatgcctgcgcggccttccggagcgaggtgtgggtgagcgcaaaggtgtccctaaccatgactttgaggtactggtatttgaagtcagtgtcgtcgcatccgccctgctcccagagcaaaaagtccgtgcgctttttggaacgcgggtttggcagggcgaaggtgacatcgttgaagagtatctttcccgcgcgaggcataaagttgcgtgtgatgcggaagggtcccggcacctcggaacggttgttaattacctgggcggcgagcacgatctcgtcaaagccgttgatgttgtggcccacaatgtaaagttccaagaagcgcgggatgcccttgatggaaggcaattttttaagttcctcgtaggtgagctcttcaggggagctgagcccgtgctctgaaagggcccagtctgcaagatgagggttggaagcgacgaatgagctccacaggtcacgggccattagcatttgcaggtggtcgcgaaaggtcctaaactggcgacctatggccattttttctggggtgatgcagtagaaggtaagcgggtcttgttcccagcggtcccatccaaggtccgcggctaggtctcgcgcggcggtcactagaggctcatctccgccgaacttcatgaccagcatgaagggcacgagctgcttcccaaaggcccccatccaagtataggtctctacatcgtaggtgacaaagagacgctcggtgcgaggatgcgagccgatcgggaagaactggatctcccgccaccagttggaggagtggctgttgatgtggtgaaagtagaagtccctgcgacgggccgaacactcgtgctggcttttgtaaaaacgtgcgcagtactggcagcggtgcacgggctgtacatcctgcacgaggttgacctgacgaccgcgcacaaggaagcagagtgggaatttgagcccctcgcctggcgggtttggctggtggtcttctacttcggctgcttgtccttgaccgtctggctgctcgaggggagttacggtggatcggaccaccacgccgcgcgagcccaaagtccagatgtccgcgcgcggcggtcggagcttgatgacaacatcgcgcagatgggagctgtccatggtctggagctcccgcggcgtcaggtcaggcgggagctcctgcaggtttacctcgcatagccgggtcagggcgcgggctaggtccaggtgatacctgatttccaggggctggttggtggcggcgtcgatggcttgcaagaggccgcatccccgcggcgcgactacggtaccgcgcggcgggcggtgggccgcgggggtgtccttggatgatgcatctaaaagcggtgacgcgggcgggcccccggaggtagggggggctcgggacccgccgggagagggggcaggggcacgtcggcgccgcgcgcgggcaggagctggtgctgcgcgcggaggttgctggcgaacgcgacgacgcggcggttgatctcctgaatctggcgcctctgcgtgaagacgacgggcccggtgagcttgaacctgaaagagagttcgacagaatcaatttcggtgtcgttgacggcggcctggcgcaaaatctcctgcacgtctcctgagttgtcttgataggcgatctcggccatgaactgctcgatctcttcctcctggagatctccgcgtccggctcgctccacggtggcggcgaggtcgttggagatgcgggccatgagctgcgagaaggcgttgaggcctccctcgttccagacgcggctgtagaccacgcccccttcggcatcgcgggcgcgcatgaccacctgcgcgagattgagctccacgtgccgggcgaagacggcgtagtttcgcaggcgctgaaagaggtagttgagggtggtggcggtgtgttctgccacgaagaagtacataacccagcgccgcaacgtggattcgttgatatcccccaaggcctcaaggcgctccatggcctcgtagaagtccacggcgaagttgaaaaactgggagttgcgcgccgacacggttaactcctcctccagaagacggatgagctcggcgacagtgtcgcgcacctcgcgctcaaaggctacaggggcctcttcttcttcttcaatctcctcttccataagggcctccccttcttcttcttctggcggcggtgggggaggggggacacggcggcgacgacggcgcaccgggaggcggtcgacaaagcgctcgatcatctccccgcggcgacggcgcatggtctcggtgacggcgcggccgttctcgcgggggcgcagttggaagacgccgcccgtcatgtcccggttatgggttggcggggggctgccgtgcggcagggatacggcgctaacgatgcatctcaacaattgttgtgtaggtactccgccaccgagggacctgagcgagtccgcatcgaccggatcggaaaacctctcgagaaaggcgtctaaccagtcacagtcgcaaggtaggctgagcaccgtggcgggcggcagcgggcggcggtcggggttgtttctggcggaggtgctgctgatgatgtaattaaagtaggcggtcttgagacggcggatggtcgacagaagcaccatgtccttgggtccggcctgctgaatgcgcaggcggtcggccatgccccaggcttcgttttgacatcggcgcaggtctttgtagtagtcttgcatgagcctttctaccggcacttcttcttctccttcctcttgtcctgcatctcttgcatctatcgctgcggcggcggcggagtttggccgtaggtggcgccctcttcctcccatgcgtgtgaccccgaagcccctcatcggctgaagcagggccaggtcggcgacaacgcgctcggctaatatggcctgctgcacctgcgtgagggtagactggaagtcgtccatgtccacaaagcggtggtatgcgcccgtgttgatggtgtaagtgcagttggccataacggaccagttaacggtctggtgacccggctgcgagagctcggtgtacctgagacgcgagtaagcccttgagtcaaagacgtagtcgttgcaagtccgcaccaggtactggtatcccaccaaaaagtgcggcggcggctggcggtagaggggccagcgtagggtggccggggctccgggggcgaggtcttccaacataaggcgatgatatccgtagatgtacctggacatccaggtgatgccggcggcggtggtggaggcgcgcggaaagtcacggacgcggttccagatgttgcgcagcggcaaaaagtgctccatggtcgggacgctctggccggtcaggcgcgcgcagtcgttgacgctctagaccgtgcaaaaggagagcctgtaagcgggcactcttccgtggtctggtggataaattcgcaagggtatcatggcggacgaccggggttcgaaccccggatccggccgtccgccgtgatccatgcggttaccgcccgcgtgtcgaacccaggtgtgcgacgtcagacaacgggggagcgctccttttggcttccttccaggcgcggcggatgctgcgctagcttttttggccactggccgcgcgcggcgtaagcggttaggctggaaagcgaaagcattaagtggctcgctccctgtagccggagggttattttccaagggttgagtcgcgggacccccggttcgagtctcgggccggccggactgcggcgaacgggggtttgcctccccgtcatgcaagaccccgcttgcaaattcctccggaaacagggacgagccccttttttgcttttcccagatgcatccggtgctgcggcagatgcgcccccctcctcagcagcggcaagagcaagagcagcggcagacatgcagggcaccctccccttctcctaccgcgtcaggaggggcaacatccgcggctgacgcggcggcagatggtgattacgaacccccgcggcgccggacccggcactacttggacttggaggagggcgagggcctggcgcggctaggagcgccctctcctgagcgacacccaagggtgcagctgaagcgtgacacgcgcgaggcgtacgtgccgcggcagaacctgtttcgcgaccgcgagggagaggagcccgaggagatgcgggatcgaaagttccatgcagggcgcgagttgcggcatggcctgaaccgcgagcggttgctgcgcgaggaggactttgagcccgacgcgcggaccgggattagtcccgcgcgcgcacacgtggcggccgccgacctggtaaccgcgtacgagcagacggtgaaccaggagattaactttcaaaaaagctttaacaaccacgtgcgcacgcttgtggcgcgcgaggaggtggctataggactgatgcatctgtgggactttgtaagcgcgctggagcaaaacccaaatagcaagccgctcatggcgcagctgttccttatagtgcagcacagcagggacaacgaggcattcagggatgcgctgctaaacatagtagagcccgagggccgctggctgctcgatttgataaacattctgcagagcatagtggtgcaggagcgcagcttgagcctggctgacaaggtggccgccattaactattccatgctcagtctgggcaagttttacgcccgcaagatataccataccccttacgttcccatagacaaggaggtaaagatcgaggggttctacatgcgcatggcgctgaaggtgcttaccttgagcgacgacctgggcgtttatcgcaacgagcgcatccacaaggccgtgagcgtgagccggcggcgcgagctcagcgaccgcgagctgatgcacagcctgcaaagggccctggctggcacgggcagcggcgatagagaggccgagtcctactttgacgcgggcgctgacctgcgctgggccccaagccgacgcgccctggaggcagctggggccggacctgggctggcggtggcacccgcgcgcgctggcaacgtcggcggcgtggaggaatatgacgaggacgatgagtacgagccagaggacggcgagtactaagcggtgatgtttctgatcagatgatgcaagacgcaacggacccggcggtgcgggcggcgctgcagagccagccgtccggccttaactccacggacgactggcgccaggtcatggaccgcatcatgtcgctgactgcgcgcaaccctgacgcgttccggcagcagccgcaggccaaccggctctccgcaattctggaagcggtggtcccggcgcgcgcaaaccccacgcacgagaaggtgctggcgatcgtaaacgcgctggccgaaaacagggccatccggcccgatgaggccggcctggtctacgacgcgctgcttcagcgcgtggctcgttacaacagcagcaacgtgcagaccaacctggaccggctggtgggggatgtgcgcgaggccgtggcgcagcgtgagcgcgcgcagcagcagggcaacctgggctccatggttgcactaaacgccttcctgagtacacagcccgccaacgtgccgcggggacaggaggactacaccaactttgtgagcgcactgcggctaatggtgactgagacaccgcaaagtgaggtgtatcagtccgggccagactattttttccagaccagtagacaaggcctgcagaccgtaaacctgagccaggctttcaagaacttgcaggggctgtggggggtgcgggctcccacaggcgaccgcgcgaccgtgtctagcttgctgacgcccaactcgcgcctgttgctgctgctaatagcgcccttcacggacagtggcagcgtgtcccgggacacatacctaggtcacttgctgacactgtaccgcgaggccataggtcaggcgcatgtggacgagcatactttccaggagattacaagtgttagccgcgcgctggggcaggaggacacgggcagcctggaggcaaccctgaactacctgctgaccaaccggcggcaaaaaatcccctcgttgcacagtttaaacagcgaggaggagcgcattttgcgctatgtgcagcagagcgtgagccttaacctgatgcgcgacggggtaacgcccagcgtggcgctggacatgaccgcgcgcaacatggaaccgggcatgtatgcctcaaaccggccgtttatcaatcgcctaatggactacttgcatcgcgcggccgccgtgaaccccgagtatttcaccaatgccatcttgaacccgcactggctaccgccccctggtttctacaccgggggattcgaggtgcccgagggtaacgatggattcctctgggacgacatagacgacagcgtgttttccccgcaaccgcagaccctgctagagttgcaacaacgcgagcaggcagaggcggcgctgcgaaaggaaagcttccgcaggccaagcagcttgtccgatctaggcgctgcggccccgcggtcagatgctagtagcccatttccaagcttgatagggtctcttaccagcactcgcaccacccgcccgcgcctgctgggcgaggaggagtacctaaacaactcgctgctgcagccgcagcgcgaaaagaacctgcctccggcgtttcccaacaacgggatagagagcctagtggacaagatgagtagatggaagacgtatgcgcaggagcacagggatgtgcccggcccgcgcccgcccacccgtcgtcaaaggcacgaccgtcagcggggtctggtgtgggaggacgatgactcggcagacgacagcagcgtcttggatttgggagggagtggcaacccgtttgcacaccttcgccccaggctggggagaatgttttaaaaaaagcatgatgcaaaataaaaaactcaccaaggccatggcaccgagcgttggttttcttgtattccccttagtatgcggcgcgcggcgatgtatgaggaaggtcctcctccctcctacgagagcgtggtgagcgcggcgccagtggcggcggcgctgggttcacccttcgatgctcccctggacccgccgttcgtgcctccgcggtacctgcggcctaccggggggagaaacagcatccgttactctgagttggcacccctattcgacaccacccgtgtgtaccttgtggacaacaagtcaacggatgtggcatccctgaactaccagaacgaccacagcaactttctaaccacggtcattcaaaacaatgactacagcccgggggaggcaagcacacagaccatcaatcttgacgaccggtcgcactggggcggcgacctgaaaaccatcctgcataccaacatgccaaatgtgaacgagttcatgtttaccaataagtttaaggcgcgggtgatggtgtcgcgctcgcttactaaggacaaacaggtggagctgaaatacgagtgggtggagttcacgctgcccgagggcaactactccgagaccatgaccatagaccttatgaacaacgcgatcgtggagcactacttgaaagtgggcaggcagaacggggttctggaaagcgacatcggggtaaagtttgacacccgcaacttcagactggggtttgacccagtcactggtcttgtcatgcctggggtatatacaaacgaagccttccatccagacatcattttgctgccaggatgcggggtggacttcacccacagccgcctgagcaacttgttgggcatccgcaagcggcaacccttccaggagggctttaggatcacctacgatgacctggagggtggtaacattcccgcactgttggatgtggacgcctaccaggcaagcttgaaagatgacaccgaacagggcgggggtggcgcaggcggcggcaacaacagtggcagcggcgcggaagagaactccaacgcggcagctgcggcaatgcagccggtggaggacatgaacgatcatgccattcgcggcgacacctttgccacacgggcggaggagaagcgcgctgaggccgaggcagcggccgaagctgccgcccccgctgcggaggctgcacaacccgaggtcgagaagcctcagaagaaaccggtgattaaacccctgacagaggacagcaagaaacgcagttacaacctaataagcaatgacagcaccttcacccagtaccgcagctggtaccttgcatacaactacggcgaccctcaggccgggatccgctcatggaccctgctttgcactcctgacgtaacctgcggctcggagcaggtatactggtcgttgcccgacatgatgcaagaccccgtgaccttccgctccacgcgccagatcagcaactttccggtggtgggcgccgagctgttgcccgtgcactccaagagcttctacaacgaccaggccgtctactcccagctcatccgccagtttacctctctgacccacgtgttcaatcgctttcccgagaaccagattttggcgcgcccgccagcccccaccatcaccaccgtcagtgaaaacgttcctgctctcacagatcacgggacgctaccgctgcgcaacagcatcggaggagtccagcgagtgaccattactgacgccagacgccgcacctgcccctacgtttacaaggccctgggcatagtctcgccgcgcgtcctatcgagccgcactttttgagcaagcatgtccatccttatatcgcccagcaataacacaggctggggcctgcgcttcccaagcaagatgtttggcggggccaagaagcgctccgaccaacacccagtgcgcgtgcgcgggcactaccgcgcgccctggggcgcgcacaaacgcggccgcactgggcgcaccaccgtcgatgacgccatcgacgcggtggtggaggaggcgcgcaactacacgcccacgccgccgccagtgtccaccgtggacgcggccattcagaccgtggtgcgcggagcccggcgctacgctaaaatgaagagacggcggaggcgcgtagcacgtcgccaccgccgccgacccggcactgccgcccaacgcgcggcggcggccctgcttaaccgcgcacgtcgcaccggccgacgggcggccatgcgagccgctcgaaggctggccgcgggtattgtcactgtgccccccaggtccaggcgacgagcggccgccgcagcagccgcggccattagtgctatgactcagggtcgcaggggcaacgtgtactgggtgcgcgactcggttagcggcctgcgcgtgcccgtgcgcacccgccccccgcgcaactagattgcaataaaaaactacttagactcgtactgttgtatgtatccagcggcggcggcgcgcatcgaagctatgtccaagcgcaaaatcaaagaagagatgctccaggtcatcgcgccggagatctatggccccccgaagaaggaagagcaggattacaagccccgaaagctaaagcgggtcaaaaagaaaaagaaagatgatgatgatgatgaacttgacgacgaggtggaactgttgcacgcgaccgcgcccaggcgacgggtacagtggaaaggtcgacgcgtaagacgtgttttgcgacccggcaccaccgtagtctttacgcccggtgagcgctccacccgcacctacaagcgcgtgtatgatgaggtgtacggcgacgaggacctgcttgagcaggccaacgagcgcctcggggagtttgcctacggaaagcggcataaggacatgctggcgttgccgctggacgagggcaacccaacacctagcctaaagcccgtgacactgcagcaggtgctgcccgcgcttgcaccgtccgaagaaaagcgcggcctaaagcgcgagtctggtgacttggcacccaccgtgcagctgatggtacccaagcgtcagcgactggaagatgtcttggaaaaaatgaccgtggagcctgggctggagcccgaggtccgcgtgcggccaatcaagcaggtggcaccgggactgggcgtgcagaccgtggacgttcagatacccaccaccagtagcactagtattgccactgccacagagggcatggagacacaaacgtccccggttgcctcggcggtggcagatgccgcggtgcaggcggccgctgcggccgcgtccaagacctctacggaggtgcaaacggacccgtggatgtttcgtgtttcagccccccggcgtccgcgccgttcaaggaagtacggcgccgccagcgcgctactgcccgaatatgccctacatccttccatcgcgcctacccccggctatcgtggctacacctaccgccccagaagacgagcaactacccgacgccgaaccaccactggaacccgccgccgccgtcgccgtcgccagcccgtgctggccccgatttccgtgcgcagggtggctcgcgaaggaggcaggaccctggtgctgccaacagcgcgctaccaccccagcatcgtttaaaagccggtctttgtggttcttgcagatatggccctcacctgccgcctccgtttcccggtgccgggattccgaggaagaatgcaccgtaggaggggcatggccggccacggcctgacgggcggcatgcgtcgtgcgcaccaccggcggcggcgcgcgtcgcaccgtcgcatgcgcggcggtatcctgcccctccttattccactgatcgccgcggcgattggcgccgtgcccggaattgcatccgtggccttgcaggcgcagagacactgattaaaaacaagttacatgtggaaaaatcaaaataaaagtctggactctcacgctcgcttggtcctgtaactattttgtagaatggaagacatcaactttgcgtcactggccccgcgacacggctcgcgcccgttcatgggaaactggcaagatatcggcaccagcaatatgagcggtggcgccttcagctggggctcgctgtggagcggcattaaaaatttcggttccgccgttaagaactatggcagcaaagcctggaacagcagcacaggccagatgctgagggacaagttgaaagagcaaaatttccaacaaaaggtggtagatggcctggcctctggcattagcggggtggtggacctggccaaccaggcagtgcaaaataagattaacagtaagcttgatccccgccctcccgtagaggagcctccaccggccgtggagacagtgtctccagaggggcgtggcgaaaagcgtccgcgacccgacagggaagaaactctggtgacgcaaatagacgagcctccctcgtacgaggaggcactaaagcaaggcctgcccaccacccgtcccatcgcgcccatggctaccggagtgctgggccagcacacacccgtaacgctggacctgcctccccccgccgacacccagcagaaacctgtgctgccaggcccgtccgccgttgttgtaacccgtcctagccgcgcgtccctgcgccgcgccgccagcggtccgcgatcgttgcggcccgtagccagtggcaactggcaaagcacactgaacagcatcgtgggtttgggggtgcaatccctgaagcgccgacgatgcttctgatagctaacgtgtcgtatgtgtgtcatgtatgcgtccatgtcgccgccagaggagctgctgagccgccgcgcgcccgctttccaagatggctaccccttcgatgatgccgcagtggtcttacatgcacatctcgggccaggacgcctcggagtacctgagccccgggctggtgcagttcgcccgcgccaccgagacgtacttcagcctgaataacaagtttagaaaccccacggtggcgcctacgcacgacgtgaccacagaccggtctcagcgtttgacgctgcggttcatccccgtggaccgcgaggatactgcgtactcgtacaaggcgcggttcaccctagctgtgggtgataaccgtgtgctagacatggcttccacgtactttgacatccgcggcgtgctggacaggggccctacttttaagccctactctggcactgcctacaacgcactggcccccaagggtgcccccaactcgtgcgagtgggaacaaaatgaaactgcacaagtggatgctcaagaacttgacgaagaggagaatgaagccaatgaagctcaggcgcgagaacaggaacaagctaagaaaacccatgtatatgcccaggctccactgtccggaataaaaataactaaagaaggtctacaaataggaactgccgacgccacagtagcaggtgccggcaaagaaattttcgcagacaaaacttttcaacctgaaccacaagtaggagaatctcaatggaacgaagcggatgccacagcagctggtggaagggttcttaaaaagacaactcccatgaaaccctgctatggctcatacgctagacccaccaattccaacggcggacagggcgttatggttgaacaaaatggtaaattggaaagtcaagtcgaaatgcaatttttttccacatccacaaatgccacaaatgaagttaacaatatacaaccaacagttgtattgtacagcgaagatgtaaacatggaaactccagatactcatctttcttataaacctaaaatgggggataaaaatgccaaagtcatgcttggacaacaagcaatgccaaacagaccaaattacattgcttttagagacaattttattggtctcatgtattacaacagcacaggtaacatgggtgtccttgctggtcaggcatcgcagttgaacgctgttgtagatttgcaagacagaaacacagagctgtcctaccagcttttgcttgattcaattggcgacagaacaagatacttttcaatgtggaatcaagctgttgacagctatgatccagatgtcagaattattgagaaccatggaactgaggatgagttgccaaattattgctttcctcttggtggaattgggattactgacacttttcaagctgttaaaacaactgctgctaacggggaccaaggcaatactacctggcaaaaagattcaacatttgcagaacgcaatgaaataggggtgggaaataactttgccatggaaattaacctgaatgccaacctatggagaaatttcctttactccaatattgcgctgtacctgccagacaagctaaaatacaaccccaccaatgtggaaatatctgacaaccccaacacctacgactacatgaacaagcgagtggtggctcctgggcttgtagactgctacattaaccttggggcgcgctggtctctggactacatggacaacgttaatccctttaaccaccaccgcaatgcgggcctgcgttaccgctccatgttgttgggaaacggccgctacgtgccctttcacattcaggtgccccaaaagttttttgccattaaaaacctcctcctcctgccaggctcatacacatatgaatggaacttcaggaaggatgttaacatggttctgcagagctctctgggaaacgaccttagagttgacggggctagcattaagtttgacagcatttgtctttacgccaccttcttccccatggcccacaacacggcctccacgctggaagccatgctcagaaatgacaccaacgaccagtcctttaatgactacctttccgccgccaacatgctatatcccatacccgccaacgccaccaacgtgcccatctccatcccatcgcgcaactgggcagcatttcgcggttgggccttcacacgcttgaagacaaaggaaaccccttccctgggatcaggctacgacccttactacacctactctggctccataccataccttgacggaaccttctatcttaatcacacctttaagaaggtggccattacttttgactcttctgttagctggccgggcaacgaccgcctgcttactcccaatgagtttgagattaagcgctcagttgacggggagggctataacgtagctcagtgcaacatgacaaaggactggttcctagtgcagatgttggccaactacaatattggctaccagggcttctacattccagaaagctacaaagaccgcatgtactcgttcttcagaaacttccagcccatgagccggcaagtggtggacgatactaaatacaaagattatcagcaggttggaattatccaccagcataacaactcaggcttcgtaggctacctcgctcccaccatgcgcgagggacaagcttaccccgctaatgttccctacccactaataggcaaaaccgcggttgatagtattacccagaaaaagtttctttgcgaccgcaccctgtggcgcatccccttctccagtaactttatgtccatgggtgcgctcacagacctgggccaaaaccttctctacgcaaactccgcccacgcgctagacatgacctttgaggtggatcccatggacgagcccacccttctttatgttttgtttgaagtctttgacgtggtccgtgtgcaccagccgcaccgcggcgtcatcgagaccgtgtacctgcgcacgcccttctcggccggcaacgccacaacataaagaagcaagcaacatcaacaacagctgccgccatgggctccagtgagcaggaactgaaagccattgtcaaagatcttggttgtgggccatattttttgggcacctatgacaagcgcttcccaggctttgtttccccacacaagctcgcctgcgccatagttaacacggccggtcgcgagactgggggcgtacactggatggcctttgcctggaacccgcgctcaaaaacatgctacctctttgagccctttggcttttctgaccaacgtctcaagcaggtttaccagtttgagtacgagtcactcctgcgccgtagcgccattgcctcttcccccgaccgctgtataacgctggaaaagtccacccaaagcgtgcaggggcccaactcggccgcctgtggcctattctgctgcatgtttctccacgcctttgccaactggccccaaactcccatggatcacaaccccaccatgaaccttattaccggggtacccaactccatgcttaacagtccccaggtacagcccaccctgcgccgcaaccaggaacagctctacagcttcctggagcgccactcgccctacttccgcagccacagtgcgcaaattaggagcgccacttctttttgtcacttgaaaaaacatgtaaaaataatgtactaggagacactttcaataaaggcaaatgtttttatttgtacactctcgggtgattatttacccccacccttgccgtctgcgccgtttaaaaatcaaaggggttctgccgcgcatcgctatgcgccactggcagggacacgttgcgatactggtgtttagtgctccacttaaactcaggcacaaccatccgcggcagctcggtgaagttttcactccacaggctgcgcaccatcaccaacgcgtttagcaggtcgggcgccgatatcttgaagtcgcagttggggcctccgccctgcgcgcgcgagttgcgatacacagggttacagcactggaacactatcagcgccgggtggtgcacgctggccagcacgctcttgtcggagatcagatccgcgtccaggtcctccgcgttgctcagggcgaacggagtcaactttggtagctgccttcccaaaaagggtgcatgcccaggctttgagttgcactcgcaccgtagtggcatcagaaggtgaccgtgcccagtctgggcgttaggatacagcgcctgcatgaaagccttgatctgcttaaaagccacctgagcctttgcgccttcagagaagaacatgccgcaagacttgccggaaaactgattggccggacaggccgcgtcatgcacgcagcaccttgcgtcggtgttggagatctgcaccacatttcggccccaccggttcttcacgatcttggccttgctagactgctccttcagcgcgcgctgcccgttttcgctcgtcacatccatttcaatcacgtgctccttatttatcataatgctcccgtgtagacacttaagctcgccttcgatctcagcgcagcggtgcagccacaacgcgcagcccgtgggctcgtggtgcttgtaggttacctctgcaaacgactgcaggtacgcctgcaggaatcgccccatcatcgtcacaaaggtcttgttgctggtgaaggtcagctgcaacccgcggtgctcctcgtttagccaggtcttgcatacggccgccagagcttccacttggtcaggcagtagcttgaagtttgcctttagatcgttatccacgtggtacttgtccatcaacgcgcgcgcagcctccatgcccttctcccacgcagacacgatcggcaggctcagcgggtttatcaccgtgctttcactttccgcttcactggactcttccttttcctcttgcatccgcataccccgcgccactgggtcgtcttcattcagccgccgcaccgtgcgcttacctcccttgccgtgcttgattagcaccggtgggttgctgaaacccaccatttgtagcgccacatcttctctttcttcctcgctgtccacgatcacctctggggatggcgggcgctcgggcttgggagaggggcgcttctttttctttttggacgcaatggccaaatccgccgtcgaggtcgatggccgcgggctgggtgtgcgcggcaccagcgcatcttgtgacgagtcttcttcgtcctcggactcgagacgccgcctcagccgcttttttgggggcgcgcggggaggcggcggcgacggcgacggggacgagacgtcctccatggttggtggacgtcgcgccgcaccgcgtccgcgctcgggggtggtttcgcgctgctcctcttcccgactggccatttccttctcctataggcagaaaaagatcatggagtcagtcgagaaggaggacagcctaaccgccccctttgagttcgccaccaccgcctccaccgatgccgccaacgcgcctaccaccttccccgtcgaggcacccccgcttgaggaggaggaagtgattatcgagcaggacccaggttttgtaagcgaagacgacgaagatcgctcagtaccaacagaggataaaaagcaagaccaggacgacgcagaggcaaacgaggaacaagtcgggcggggggaccaaaggcatggcgactacctagatgtgggagacgacgtgctgttgaagcatctgcagcgccagtgcgccattatctgcgacgcgttgcaagagcgcagcgatgtgcccctcgccatagcggatgtcagccttgcctacgaacgccacctgttctcaccgcgcgtaccccccaaacgccaagaaaacggcacatgcgagcccaacccgcgcctcaacttctaccccgtatttgccgtgccagaggtgcttgccacctatcacatctttttccaaaactgcaagatacccctatcctgccgtgccaaccgcagccgagcggacaagcagctggccttgcggcagggcgctgtcatacctgatatcgcctcgctcgacgaagtgccaaaaatctttgagggtcttggacgcgacgagaagcgcgcggcaaacgctctgcaacaagaaaacagcgaaaatgaaagtcactgtggagtgctggtggaacttgagggtgacaacgcgcgcctagccgtgctgaaacgcagcatcgaggtcacccactttgcctacccggcacttaacctaccccccaaggttatgagcacagtcatgagcgagctgatcgtgcgccgtgcacgacccctggagagggatgcaaacttgcaagaacaaaccgaggagggcctacccgcagttggcgatgagcagctggcgcgctggcttgagacgcgcgagcctgccgacttggaggagcgacgcaagctaatgatggccgcagtgcttgttaccgtggagcttgagtgcatgcagcggttctttgctgacccggagatgcagcgcaagctagaggaaacgttgcactacacctttcgccagggctacgtgcgccaggcctgcaaaatttccaacgtggagctctgcaacctggtctcctaccttggaattttgcacgaaaaccgccttgggcaaaacgtgcttcattccacgctcaagggcgaggcgcgccgcgactacgtccgcgactgcgtttacttatttctgtgctacacctggcaaacggccatgggcgtgtggcagcagtgcctggaggagcgcaacctgaaggagctgcagaagctgctaaagcaaaacttgaaggacctatggacggccttcaacgagcgctccgtggccgcgcacctggcggacattatcttccccgaacgcctgcttaaaaccctgcaacagggtctgccagacttcaccagtcaaagcatgttgcaaaactttaggaactttatcctagagcgttcaggaattctgcccgccacctgctgtgcgcttcctagcgactttgtgcccattaagtaccgtgaatgccctccgccgctttggggtcactgctaccttctgcagctagccaactaccttgcctaccactccgacatcatggaagacgtgagcggtgacggcctactggagtgtcactgtcgctgcaacctatgcaccccgcaccgctccctggtctgcaattcacaactgcttagcgaaagtcaaattatcggtacctttgagctgcagggtccctcgcctgacgaaaagtccgcggctccggggttgaaactcactccggggctgtggacgtcggcttaccttcgcaaatttgtacctgaggactaccacgcccacgagattaggttctacgaagaccaatcccgcccgccaaatgcggagcttaccgcctgcgtcattacccagggccacatccttggccaattgcaagccattaacaaagcccgccaagagtttctgctacgaaagggacggggggtttacttggacccccagtccggcgaggagctcaacccaatccccccgccgccgcagccctatcagcagccgcgggcccttgcttcccaggatggcacccaaaaagaagctgcagctgccgccgccgccacccacggacgaggaggaatactgggacagtcaggcagaggaggttttggacgaggaggaggagatgatggaagactgggacagcctagacgaggaagcttccgaggccgaagaggtgtcagacgaaacaccgtcaccctcggtcgcattcccctcgccggcgccccagaaatcggcaaccgttcccagcattgctacaacctccgctcctcaggcgccgccggcactgcccgttcgccgacccaaccgtagatgggacaccactggaaccagggccggtaagtctaagcagccgccgccgttagcccaagagcaacaacagcgccaaggctaccgctcgtggcgcgtgcacaagaacgccatagttgcttgcttgcaagactgtgggggcaacatctccttcgcccgccgctttcttctctaccatcacggcgtggccttcccccgtaacatcctgcattactaccgtcatctctacagcccctactgcaccggcggcagcggcagcaacagcagcggccacgcagaagcaaaggcgaccggatagcaagactctgacaaagcccaagaaatccacagcggcggcagcagcaggaggaggagcactgcgtctggcgcccaacgaacccgtatcgacccgcgagcttagaaacaggatttttcccactctgtatgctatatttcaacagagcaggggccaagaacaagagctgaaaataaaaaacaggtctctgcgctccctcacccgcagctgcctgtatcacaaaagcgaagatcagcttcggcgcacgctggaagacgcggaggctctcttcagcaaatactgcgcgctgactcttaaggactagtttcgcgccctttctcaaatttaagcgcgaaaactacgtcatctccagcggccacacccggcgccagcacctgtcgtcagcgccattatgagcaaggaaattcccacgccctacatgtggagttaccagccacaaatgggacttgcggctggagctgcccaagactactcaacccgaataaactacatgagcgcgggaccccacatgatatcccgggtcaacggaatccgcgcccaccgaaaccgaattctcctcgaacaggcggctattaccaccacacctcgtaataaccttaatccccgtagttggcccgctgccctggtgtaccaggaaagtcccgctcccaccactgtggtacttcccagagacgcccaggccgaagttcagatgactaactcaggggcgcagcttgcgggcggctttcgtcacagggtgcggtcgcccgggcagggtataactcacctgaaaatcagagggcgaggtattcagctcaacgacgagtcggtgagctcctctcttggtctccgtccggacgggacatttcagatcggcggcgctggccgctcttcatttacgccccgtcaggcgatcctaactctgcagacctcgtcctcggagccgcgctccggaggcattggaactctacaatttattgaggagttcgtgccttcggtttacttcaaccccttttctggacctcccggccactacccggaccagtttattcccaactttgacgcggtaaaagactcggcggacggctacgactgaatgaccagtggagaggcagagcaactgcgcctgacacacctcgaccactgccgccgccacaagtgctttgcccgcggctccggtgagttttgttactttgaattgcccgaagagcatatcgagggcccggcgcacggcgtccggctcaccacccaggtagagcttacacgtagcctgattcgggagtttaccaagcgccccctgctagtggagcgggagcggggtccctgtgttctgaccgtggtttgcaactgtcctaaccctggattacatcaagatctttgttgtcatctctgtgctgagtataataaatacagaaattagaatctactggggctcctgtcgccatcctgtgaacgccaccgtttttacccacccaaagcagaccaaagcaaacctcacctccggtttgcacaagcgggccaataagtaccttacctggtactttaacggctcttcatttgtaatttacaacagtttccagcgagacgaagtaagtttgccacacaaccttctcggcttcaactacaccgtcaagaaaaacaccaccaccaccctcctcacctgccgggaacgtacgagtgcgtcaccggttgctgcgcccacacctacagcctgagcgtaaccagacattactcccattttcccaaaacaggaggtgagctcaactcccggaactcaggtcaaaaaagcattttgcggggtgctgggattttttaattaagtatatgagcaattcaagtaactctacaagcttgtctaatttttctggaattggggtcggggttatccttactcttgtaattctgtttattcttatactagcacttctgtgccttagggttgccgcctgctgcacgcacgtttgtacctattgtcagctttttaaacgctgggggcgacatccaagatgaggtacatgattttaggcttgctcgcccttgcggcagtctgcagcgctgccaaaaaggttgagtttaaggaaccagcttgcaatgttacatttaaatcagaagctaatgaatgcactactcttataaaatgcaccacagaacatgaaaagcttattattcgccacaaagacaaaattggcaagtatgctgtatatgctatttggcagccaggtgacactaacgactataatgtcacagtcttccaaggtgaaaatcgtaaaacttttatgtataaatttccattttatgaaatgtgcgatattaccatgtacatgagcaaacagtacaagttgtggcccccacaaaagtgtttagagaacactggcaccttttgttccaccgctctgcttattacagcgcttgctttggtatgtaccttactttatctcaaatacaaaagcagacgcagttttattgatgaaaagaaaatgccttgattttccgcttgcttgtattcccctggacaatttactctatgtgggatatgcgccaggcgggaaagattatacccacaaccttcaaatcaaactttcctggacgttagcgcctgacttctgccagcgcctgcactgcaaatttgatcaaacccagcttcagcttgcctgctccagagatgaccggctcaaccatcgcgcccacaacggactatcgcaacaccactgctaccggactaaaatctgccctaaatttaccccaagttcatgcctttgtcaatgactgggcgagcttgggcatgtggtggttttccatagcgcttatgtttgtttgccttattattatgtggcttatttgttgcctaaagcgcagacgcgccagaccccccatctataggcctatcattgtgctcaacccacacaatgaaaaaattcatagattggacggtctcaaaccatgttctcttcttttacagtatgattaaatgagacatgattcctcgagtccttatattattgacccttgttgcgcttttctgtgcgtgctctacattggctgcggtcgctcacatcgaagtagattgcatcccacctttcacagtttacctgctttacggatttgtcacccttatcctcatctgcagcctcgtcactgtagtcatcgccttcattcagttcattgactggatttgtgtgcgcattgcgtaccttaggcaccatccgcaatacagagacaggactatagctgatcttctcagaattctttaattatgaaacggattgtcacttttgttttgctgattttctgcgccctacctgtgctttgctcccaaacctcagcgcctcccaaaagacatatttcctgcagattcactcaaatatggaacattcccagctgctacaacaaacagagcgatttgtcagaagcctggttatacgccatcatctctgtcatggttttttgcagtaccatttttgccctagccatatacccataccttgacattggttggaatgccatagatgccatgaaccaccctactttcccagcgcccaatgtcataccactgcaacaggttattgccccaatcaatcagcctcgccccccttctcccacccccactgagattagctactttaatttgacaggtggagatgactgaatctctagatctagaattggatggaattaacaccgaacagcgcctactagaaaggcgcaaggcggcgtccgagcgagaacgcctaaaacaagaagttgaagacatggttaacctgcaccagtgtaaaagaggtatcttttgtgtggtcaagcaggccaaacttacctacgaaaaaaccactaccggcaaccgccttagctacaagctacccacccagcgccaaaaactggtgcttatggtgggagaaaaacctatcaccgtcacccagcactcggcagaaacagaaggctgcctgcacttcccctatcagggtccagaggacctctgcactcttattaaaaccatgtgtggcattagagatcttattccattcaactaacaataaacacacaataaattacttacttaaaatcagtcagcaaatctttgtccagcttattcagcatcacctcctttccctcctcccaactctggtatttcagcagccttttagctgcgaactttctccaaagtctaaatgggatgtcaaattcctcatgttcttgtccctccgcacccactatcttcatattgttgcagatgaaacgcgccagaccgtctgaagacaccttcaaccctgtgtacccatatgacacggaaaccggccctccaactgtgcctttccttacccctccctttgtgtcgccaaatgggttccaagaaagtccccccggagtgctttctttgcgtctttcagaacctttggttacctcacacggcatgcttgcgctaaaaatgggcagcggcctgtccctggatcaggcaggcaaccttacatcaaatacaatcactgtttctcaaccgctaaaaaaaacaaagtccaatataactttggaaacatccgcgccccttacagtcagctcaggcgccctaaccatggccacaacttcgcctttggtggtctctgacaacactcttaccatgcaatcacaagcaccgctaaccgtgcaagactcaaaacttagcattgctaccaaagagccacttacagtgttagatggaaaactggccctgcagacatcagcccccctctctgccactgataacaacgccctcactatcactgcctcacctcctcttactactgcaaatggtagtctggctgttaccatggaaaacccactttacaacaacaatggaaaacttgggctcaaaattggcggtcctttgcaagtggccaccgactcacatgcactaacactaggtactggtcagggggttgcagttcataacaatttgctacatacaaaagttacaggcgcaatagggtttgatacatctggcaacatggaacttaaaactggagatggcctctatgtggatagcgccggtcctaaccaaaaactacatattaatctaaataccacaaaaggccttgcttttgacaacaccgcaataacaattaacgctggaaaagggttggaatttgaaacagactcctcaaacggaaatcccataaaaacaaaaattggatcaggcatacaatataataccaatggagctatggttgcaaaacttggaacaggcctcagttttgacagctccggagccataacaatgggcagcataaacaatgacagacttactctttggacaacaccagacccatccccaaattgcagaattgcttcagataaagactgcaagctaactctggcgctaacaaaatgtggcagtcaaattttgggcactgtttcagctttggcagtatcaggtaatatggcctccatcaatggaactctaagcagtgtaaacttggttcttagatttgatgacaacggagtgcttatgtcaaattcatcactggacaaacagtattggaactttagaaacggggactccactaacggtcaaccatacacttatgctgttgggtttatgccaaacctaaaagcttacccaaaaactcaaagtaaaactgcaaaaagtaatattgttagccaggtgtatcttaatggtgacaagtctaaaccattgcattttactattacgctaaatggaacagatgaaaccaaccaagtaagcaaatactcaatatcattcagttggtcctggaacagtggacaatacactaatgacaaatttgccaccaattcctataccttctcctacattgcccaggaataaagaatcgtgaacctgttgcatgttatgtttcaacgtgtttatttttcaattgcagaaaatttcaagtcatttttcattcagtagtatagccccaccaccacatagcttatactaatcaccgtaccttaatcaaactcacagaaccctagtattcaacctgccacctccctcccaacacacagagtacacagtcctttctccccggctggccttaaacagcatcatatcatgggtaacagacatattcttaggtgttatattccacacggtctcctgtcgagccaaacgctcatcagtgatgttaataaactccccgggcagctcgcttaagttcatgtcgctgtccagctgctgagccacaggctgctgtccaacttgcggttgctcaacgggcggcgaaggagaagtccacgcctacatgggggtagagtcataatcgtgcatcaggatagggcggtggtgctgcagcagcgcgcgaataaactgctgccgccgccgctccgtcctgcaggaatacaacatggcagtggtctcctcagcgatgattcgcaccgcccgcagcataaggcgccttgtcctccgggcacagcagcgcaccctgatctcacttaagtcagcacagtaactgcagcacagtaccacaatattgtttaaaatcccacagtgcaaggcgctgtatccaaagctcatggcggggaccacagaacccacgtggccatcataccacaagcgcaggtagattaagtggcgacccctcataaacacgctggacataaacattacctcttttggcatgttgtaattcaccacctcccggtaccatataaacctctgattaaacatggcgccatccaccaccatcctaaaccagctggccaaaacctgcccgccggctatgcactgcagggaaccgggactggaacaatgacagtggagagcccaggactcgtaaccatggatcatcatgctcgtcatgatatcaatgttggcacaacacaggcacacgtgcatacacttcctcaggattacaagctcctcccgcgtcagaaccatatcccagggaacaacccattcctgaatcagcgtaaatcccacactgcagggaagacctcgcacgtaactcacgttgtgcattgtcaaagtgttacattcgggcagcagcggatgatcctccagtatggtagcgcgtgtctctgtctcaaaaggaggtaggcgatccctactgtacggagtgcgccgagacaaccgagatcgtgttggtcgtagtgtcatgccaaatggaacgccggacgtagtcatatttcctgaagcaaaaccaggtgcgggcgtgacaaacagatctgcgtctccggtctcgtcgcttagctcgctctgtgtagtagttgtagtatatccactctctcaaagcatccaggcgccccctggcttcgggttctatgtaaactccttcatgcgccgctgccctgataacatccaccaccgcagaataagccacacccagccaacctacacattcgttctgcgagtcacacacgggaggagcgggaagagctggaagaaccatgttttttttttttattccaaaagattatccaaaacctcaaaatgaagatctattaagtgaacgcgctcccctccggtggcgtggtcaaactctacagccaaagaacagataatggcatttgtaagatgttgcacaatggcttccaaaaggcaaactgccctcacgtccaagtggacgtaaaggctaaacccttcagggtgaatctcctctataaacattccagcaccttcaaccatgcccaaataattttcatctcgccaccttatcaatatgtctctaagcaaatcccgaatattaagtccggccattgtaaaaatctgctccagagcgccctccaccttcagcctcaagcagcgaatcatgattgcaaaaattcaggttcctcacagacctgtataagattcaaaagcggaacattaacaaaaataccgcgatcccgtaggtcccttcgcagggccagctgaacataatcgtgcaggtctgcacggaccagcgcggccacttccccgccaggaaccatgacaaaagaacccacactgattatgacacgcatactcggagctatgctaaccagcgtagccccgatgtaagcttgttgcatgggcggcgatataaaatgcaaggtactgctcaaaaaatcaggcaaagcctcgcgcaaaaaagcaagcacatcgtagtcatgctcatgcagataaaggcaggtaagttccggaaccaccacagaaaaagacaccatttttctctcaaacatgtctgcgggttcctgcataaacacaaaataaaataacaaaaaaaaaaaaacatttaaacattagaagcctgtcttacaacaggaaaaacaacccttataagcataagacggactacggccatgccggcgtgaccgtaaaaaaactggtcaccgtgattaaaaagcaccaccgacagttcctcggtcatgtccggagtcataatgtaagactcggtaaacacatcaggttggttaacatcggtcagtgctaaaaagcgaccgaaatagcccgggggaatacatacccgcaggcgtagagacaacattacagcccccataggaggtataacaaaattaataggagagaaaaacacataaacacctgaaaaaccctcctgcctaggcaaaatagcaccctcccgctccagaacaacatacagcgcttccacagcggcagccataacagtcagccttaccagtaaaaaaacctattaaaaaacaccactcgacacggcaccagctcaatcagtcacagtgtaaaaagggccaagtacagagcgagtatatataggactaaaaaatgacgtaacggttaaagtccacaaaaaccacccagaaaaccgcacgcgaacctacgcccagaaacgaaagccaaaaaacccacaacttcctcaaatcttcacttccgttttcccacgatacgtcacttcccattttaaaaaaaaactacaattcccaatacatgcaagttactccgccctaaaacctacgtcacccgccccgttcccacgccccgcgccacgtcacaaactccaccccctcattatcatattggcttcaatccaaaataaggtatattattgatgatgttaattaa

SEQ ID NO: 18 - DNA, 31646 bp, Adenovirus D8
  MISC_FEATURE (1)..(31646): Complete Genome
cgatcgcgtttaaacaagggcgaattccagcacactggcggccgttactagtggatccgagctcggtaccaagcttgatgcatagcttgagtattctatagtgtcacctaaatagcttggcctatctatataatataccccacaaagtaaacaaaagttaatatgcaaatgagcttttaaattttaacggttttagggcagggccaacgttaagtggttaacaagcggtaatgcagttgacgtcaagacatcatcataatataccccacaaagtaaacaaaagttaatatgcaaatgagcttttaaattttaacggttttagggcagggccaacgttaagtggttaacaagcggtaatgcagttgacgtcaagacatcatcataatataccccacaaagtaaacaaaagttaatatgcaaatgagcttttaaattttaacggttttagggcagggccaacgttaagtggttaacaagcggtaatgcagttgacgtcaagacgtacggccggcggttgccgcaaaggcgtggcccaacccggaagcaagtcgcggggccgatgacgtataaaaaagtggactttaaacccggaaacggccgattttcccacggccacgcccggatatgaggtaattttgggcggttgcaaataaaattaggacatggtggcgccaaaactgaatgaggaagtgaaaagcgaaaaataccggtcccgcccagggcggaatatttaccgagggccaacagactttgaccgattacgtggggtttcgattacggtgtttttttttcgccaatttccgcgtccgtgttaaatccggtgtttatgttacacatcagctgatccacagggtatttaaaccagttaagcccgtcaagagactactcttgagtgccagcgagtagagttttctctaaactttgcttttaaagtttaagaaaaatgagacacctgcacctcctgtcttcaactgtgcctattgacatggccgcattattgctggaggactatgtaaatacaatattggaggacgaactgcatttatctccgtttgagctgggacccacacttcaggacctatatgatttggaggtaaatgcccaggagaacgacccaaacgaagaggctgtgaatttaatatttccagaatctatgattcttcaggctgacatagccagcgaagctgtacctacttcagtttatacaccgactctgccgcctatacctaaattggaagaggaggataagctagaccttcggtgttatgaggaaggttttcctcccagcgattcagaggacgaacggggtgagcagagcatggctataatctcagactatgcgtgtgtggttgtggaaaatcattttgtgttggacaatcctgaggtgccagggcaaggctgtaaatcctgtcaatatcaccgggaacagaccggagacccaaatgcttcctgcgctctgtgttacatgaaaatgagcttcagctttatttacagtaagtggagtaaatgtaagagaggctaagtgcttaagacattactgtgctttacttgaacagctgtactaagtgtggtttatttttggtactaggtccggtgtcagaggatgagtcatcacctttagaagaagaccacccgtctccccctgatcttacaaatgacacgcccctgcaagtgcgcagacccaccccggttagaccgagtggcgagaggcgagcggctgtttacaaaattgaggatttgttgcaggacgtgggtgggaatgaacctttgaacctgagcttgaaacgccccaggaactaggcgcagctgtgcttagtcatgtgtaaataaagttgtgcaataaaagtatgtgtgacgcatgcaaggtgtggtttatgactcatgggcggggcttagtcctatataagtggtaacacctgggcacttaggcacaaacgttaggaaattcctaatggatgtgtggagtattcttggggaatttaacaagacacgccggcttgtggaggatagttcagacgggtgctccgggttttggagacactggtttggaactcctctatctcgcctggtgtacacagttaagaaggattatagcgaggaatttgaaaatctttttgccgactgctctggcctgctagattctttaaattttggccaccagtcccttttccaggaaagggtactccacagccttgatttttccagcccagggcgcactacagccggggttgcttttgtggtttttttggttgacaaatggagccaggacacccaactaagcaggggctacattctggactttgcagccatgcacctgtggagggcctggatgaggcagcggggacagagaatcttgaactactggcttctacagccagcagcttcgggtcttcttcatctacacagacaaacatccatgttggaggaagaaatgagggaggccatggacaagaacccgaggagcggcctggaccctccgtcggaagaggagctggattaaatgaggtatccagcctatacccagagcttagcaaggtgctgacatccatggccaggggagtgaagagggagaggagcgatgggggcaatactgggctgatgacccagctaactgccagcctgatgaatcgcaagcgcccagagcgtattacctggcacgagctacagcaggagtgcagggatgagataggcctgatgcaggataaatatggcctggagcaaataaaaacccattggttgaacccagacgaggattgggaggaggccattaagaaatatgccaagatagccctgcgcccagattgcaagtacagggtgactaagaccgtgaatattaaacatgcctgctacatctcggggaacggggcagaggtggacatcgatactctggacaagtcagccttcaggtgttgcatgatgggaatgagagcaggagtaatgaatatgaattccatgatctttataaacataaagttcaatggagagaagtttaatggggtactgtttatggccaacagccacatgaccctgcatggttgcagtttttttggctttaacaatatgtgtgcagaggtctggggtgctgctaagattaggggatgtaagttttacggctgctggatgggcgtggttggaagacccaagagcgagatgtctgtaaagcagtgtgtgtttgaaaaatgctacctgggagtctgtaccgagggcaatgctagagtaagacactgctcttccctagagacgggctgcttttgcctggtgaagggcacagcctcgattaagcataatgtggtaaagggctgcacggatgagcgcatgtacaacatgctgacctgcgactcgggggtctgccatatcctgaagaacatccatgtgacctcccaccccagaaaaaagtggccagtgtttgagaataacctgctgattaagtgccatatgcacctgggtgccagaaggggcaccttccagccgtaccagtgcaactttagccagaccaagctgctgttggagaacgatgccttctccagggtgaacctgaacggcatctttgacatggatgtctcggtgtacaagatcctgagatacgatgagaccaagtccagggtgcgcgcttgcgagtgcggtggcagacacaccaggatgcagccagtggccctggatgtgaccgaggagctgcgaccagaccacctggtgatggcctgtaccgggaccgagttcagctccagtggggaggacacagattagaggtaggtttaagtagtgggcgtggctaaggtaagtataaaggcgggtgtcttacaagggtctttttgcttttctgcagacatcatgaacgggaccggcggggcctttgaaggggggctttttagcccttatttgacaacccgcctgccgggatgggccggagttcgtcagaatgtgatgggatcaacggtggacgggcgcccagtgcttccagcaaattcctctaccatgacctacgcgaccgtggggacgagctcgtcgcttgacagcaccgccgcagccgcggcagccgcagccgccatgacagcgacgagactggcctcgagctacatgcccagcagcggtagcagcccctccatccccagttccatcatcgccgaggagaaactgctggccctgctggctgagctggaagccctgagccgccagctgaccgccctgacccaggaggtgtccgagctccgcgaacagcagcagcagcaaaataaatgatttaataaacacagattttgattcaaacagcaaagcatctttattatttattttttcgcgcgcggtaggccctggtccacctctcccgatcattaagagtgcggtggattttttccaggacccggtagaggtgggattggatgttgaggtacatgggcataagcccgtcccgggggtggaggtagcaccactgcatggcctcgtgttctggggttgtgttgtagatgatccagtcatagcaggggcgctgggcgtggtgctggatgatgtccttaaggaggagactgatggccacggggagccccttggtgtaggtgttggcaaagcggttgagctgggagggatgcatgcggggggagatgatgtgtagtttggcctggatcttaaggttggcgatgttaccgcccagatcccgccgggggttcatgttgtgcaggaccaccaggacggtgtagcccgtgcacttggggaacttgtcatgcaacttggaagggaaagcgtggaagaatttggagacgcccttgtgcccgcccaggttttccatgcactcatccatgatgatggcaatgggcccgtgggctgcggctttggcaaagacgtttctggggtcagagacatcgtaattatgctcttgggtgagatcatcataagacattttaatgaatttggggcggagggtgccagattgtgggacgatggttccctcgggccccggggcgaagttcccctcgcagatctgcatctcccaggctttcatctcggagggggggatcatgtccacctgcggggcgatgaaaaaaatggtttccggggcgggggtgatgagctgcgaggagagcaggtttcttaacagctgggacttgccgcacccggttgggccgtagatgaccccgatgacgggttgcaggtggtagttcaaggagatgcagctgccgtcgtcccggaggaggggggctacctggttaagcatgtctctgacttggaggttttcccgaacaagctcgctaaggaggcggtccccgcccagcgagagcagttcttgcagggaagcaaagttttttaggggcttaagcccgtcggccatgggcatcttggcgagggtgtgcgagaggagctccaggcggtcccacagctcggtgacgtgctctacggcatctggatccagcagacttcctcgtttcgggggttgggacgactgcgactgtagggcacaagacgatgggcgtccagcgcaaccagcgtcatgtccttccagggtctcagggtccgcgtgagggtggtctccgtcacggtgaaggggtgggccccgggctgggcgcttgcaagggtgcgcttgagactcatcctgctggtgctgaaacgggcacggtcttcgccctgcgcgtcggcaagatagcagttgaccataagctggtagttaagggtctcggcggcatggcccttggcgcggagcttgcccttggaagagcgcccacaggcgggacagaggagggattgcagggcgtagagtttaggcgcgagaaaaacggactctggggcaaaggcatccgctccgcagtggacgcagacggtctcgcactcaacaagccaggtgagctcgggctgcttggggtcaaaaaccagttttcccccgttctttttgatgcgcttcttacctcgcgtctccatgagtctgtgtccgcgctcggtgacaaacaggctgtcggtgtccccgtagacggacttgattggcctgtcctgcaggggcgtcccgcggtcctcctcgtaaagaaactcggaccactctgagacaaaggcgcgcgtccacgccaagacaaaggaggccacgtgcgaggggtagcggtcattgtccaccagggggtccaccgtttccaccgtgtgcagacacatgtccccctcctccgcatccaagaaggtgattggcttgtaggtgtaggccacgtgaccgggggttcccgacggaggggtataaaagggggcgggtctgtgctcgtcctcactctcttccgcgtcgctgtccacgagcgtcagctgttggggtaggtattgcctctcgagagctggcatgacctcggcactcaggttgtcagtttctagaaacgaggaggatttgatgttggcctgccctgtcgcaatgcttttcaggagactttcatccatctggtcagaaaagactatttttttattgtcaagcttggtggcaaaggagccatagagggcgttggagagaagcttggcgatggatctcatggtctgatttttgtcacggtcggcgcgctccttggccgcaatgttgagctggacatattcgcgcgcaacgcacttccattcgggaaaaacagtggtgcgctcgtcgggcacaatcctgacgcgccagcctcggttatgcagggtgaccaggtccacgctggtggccacctcgccgcgcaggggttcgttggtccagcagaggcgcccgcccttgcgcgagcaaaaaggtggtaacacatcaagcaaatgctcgtcaggggggtccgcatcgatggtgaagatgcccggacagagttccttgtcaaaataatcaatttttaaggatgcatcatccaaggccatttgccacttgcgggcggccagggctcgctcgcaggggttcaggggcggaccccagggcatgggatgcgtaagcgcggaggcgtacatgccgcagatgtcatacacatagatgggctccgagaggatgccgatgtaggtgggataacagcgccccccgcggatgctggcgcgcacgtagtcatacaactcatgcgagggtgccaagaaggcggggccaagattggtacgctggggctgctcggcgcgaaagacgatctggcgaaagatggcatgcgagttggaggaaatagtgggccgttggaagatgttaaagtgggcgtggggcaggcggaccgagtcgcggataaagtgcgcgtaggagtcttgcagcttggcaaccagctcggcagtgacaaggacgtccatggcgcagtagtccagcgtttcgcggataatgtcataacccgtctgtcctttcttctcccacagctcgcggttaagggcgtactcctcgtcatccttccagtactcccggagcgggaatccttgatcgtccgcacggtaagagcccagcatgtagaaatggttaacggccttgtagggacagcagcccttctccacggggagggcgtaagcttgagcggccttgcggagcgaggtgtgcgtcagggcaaaggtgtccctgaccatgactttcaaaaactggtacttaaagtccgagtcgtcgcagccgccgtgttcccatagctcaaaatctgtgcgcttctttgagagggggttaggcagagcgaaagtgacgtcattgaagagaatcttgcctgctcgtggcatgaaattgcgggtgatacggaaagggcccgggacgcaggctcggttgttgataacctgggcggctaggacaatctcgtcaaagccgttgatgttgtgcccgacgatgtatagttccataaatcgcgggcggcctttgatgtgcggcagctttttaagctcctcgtaggtaaggtcctcagggcattgcaggccgtgctgctccagtgcccactcctggagatgtgggttggcttgcatgaaagaagcccagagctcgcgggccataagggtctgaagctcgtcgcgaaagaggcggaactgctggcccacggccatcttttcgggggtgatgcagtaaaaggtaagggggtcccgctcccagcgatcccagcgtaaacgcacggcaagatcgcgagcaagggcgaccagcttggggtccccggagaattttatgaccagcatgaaggggacgagctgcttgccgaaggaccccatccaggtgtaggtttctacatcgtaggtgacaaagagccgctccgtgcgaggatgagagccgattgggaagaactggatttcctgccaccagttggacgagtggctgttgatgtgatgaaagtagaaatccctccggcgaaccgagcactcgtgctgatgcttgtaaaagcgtccgcaatactcgcagcgctgcacgggctgtaccttatccacgagatacacagcgcgtcccttaaggaaaaacttcaggagtggcggccctggctggtggttttcatgttcgcctgcgtaggacttaccctggggctcctcgaggacggagaggctgacaagcccgcgcgggagccaggtccagatctcggcgcggcgggggcggagagcgaagacaagggcgcgcagttgggagctgtccatggtgtcgcggagatccaggtccgggggcagggttctaaggttgaccttgtagaggcgggtgagggcgtgcttgagatgcaaatggtacttgatttctacgggtgagttggtggccgtgtccacgcattgcatgagcccgtagctgcgcggggccacgaccgtgccgcggtgggtttttaaaagcggtgtcgcggacgcgctcccggcggcagcggcggttccggccccatgggcaggggcggcagaggcacgtcggcgtggcgctcgggcaggtcccggtgctgtgccctgagagcgctggcgtgcgcgacgacgcggcggttgacatcctggatctgccgcctctgcgtgaagaccacgggtcccgtgactttgaacctgaaagacagttcaacagaatcaatctcggcgtcattgacggcggcctgccgcaggatctcttgcacgtcgcccgagttgtcctggtaggcgatctcggacatgaactgctcgatctcctcctcctggagatcgccgcgacccgcacgctcgacggtagcggcaaggtcattcgagatgcggtccataagctgcgaaaaggcgcccaggccgctctcgttccagacgcggctgtacaccacgtccccgtcaacgtcgcgcgcgcgcatgaccacctgcgcaaggttaagctccacgtgccgcgtaaaaacggcgtagttgcgcaggcgctgaaaaaggtagttaagggtggtggcaatgtgctcggtaacaaaaaagtacataatccagcggcgcaggggcatttcgctgatgttgccaatggcctccagcctttccatagcctcgtagaagtccacggcgaagttgaaaaactgggcgttgcgggccgataccgtaagctcgtcttccagaagccggatgagctcggcgatggtggcgcgcacctcgcgctcaaaatccccgggggcctcctcttcttcctgttccataacgacctcttcttgtatttcttctgggggcggtggtggtggcggggcccgacgacgacggcgacgcaccgggagacggtcgacgaagcgctcgatcatctccccgcggcggcgacgcatggtttcagtgacggcgcgaccctgttcgcgaggacgcagcgtgaagacgccgccggtcatctcccggtaatagggcgggtccccgttgggtagcgaaagggcgctaacaatgcatcttattaattgcggtgtaggggacgtaagcacgtcaagatcgaccggatcggaaaatttttgaaggaaagcgtctagccaatcgcagtcacaaggtaagcttaaacacgtagcagccctgtggacactgttacaattgcgattgctaatgatgtaattgaagtaggcgtttttcaggcggcggatggtggcaagaaggaccaggtccttgggtcccgcttgctgtatgcggagccgctcggccatgccccaggcctgaccctgacaccggctgaggttcttgtagtagtcatgcatgagcctctcaatgtcatcatttgcggcggaggcggagtcttccatgcgggtgaccccgacgcccctaagcggctgcacgagcgccaggtcggcgacgacacgctcggcgaggatggcctgttgcacgcgggtgagggtgtcttggaagtcgtccatgtcaacaaagcggtggtaggccccggtgttgatggtgtaggtgcagttggccataagcgaccagttaacggtttgcaaaccgggctgcacgacctcggagtacctaagccgcgagaaggcgcgcgagtcaaagacgtagtcgttgcaggtgcgcacaaggtactgatatccgactaggaagtgcggcggcggctggcggtacagcggccagcgctgggtggccggcgcgcccggggccaggtcctcgagcatgaggcggtggtagccgtagaggtagcgggacatccaggtgatgccggcggcggtggtggaggcgcgcgggaactcgcggacgcggttccagatgttgcgcagcggtaggaaataatccatggtcggcacggtctggccggtaagacgtgcgcagtcattgacgctctagaggcaaaaacgaaagcggttgagcaggctcttcctccgtagcctggcggaacgcaaacgggttaggccgcgcgtgtaccccggttcgagtcccctcgaatcaggctaaagccgcgactaacgtggtattggcactcccgtctcgacccaagcccgatagccgccaggatacggtgaagagcctttttgccggccgagtggggtcgctagatttgaaagcggttaaaaaccccgctgggtagtggctcgcgcccgtagtctggacaagcatcactagggttaagttacagcagaacccggttcgcggacggccgcggcaagcgggacttagttaccccgccaatttaaagacccgcagccagccgacttttccagttacgggagcgagcccccttttttctttttgccagatgcatcccgtcctgcgccaaatgcgtcccacccccccggcgaccaccgcaaccgcggccgtagcaggcgccggcgctgtacaacagcagacagagatggacttggaagagggcgaagggctggcgagactgggggcgccgtccccggagcaacacccccgcgtgcagctgcaaaaggacgtgcgcccggcgtacgtgcctgcgcagaacctgttcagggaccgcagtggggaggagcccgaggagatgcgcgactgccggtttcgggcgggcagggagctgcgcgagggcctggaccgccagcgcgtgctgcgcgacgatgattttgagccaaacgagcagacggggatcagccccgcgcgcgcgcacgtggcggcggccaacctggtgacggcctacgagcagacggtaaaacaggagcgcaacttccaaaagagttttaacaaccacgtgcgcaccctgatcgcgcgcgaggaggtggccctgggcctgatgcacctatgggacctggcggaggccatcgtacagaacccgaacagcaagcctctgacggcgcagctgttcctggtggtgcagcacagcagggacaacgaggcgtttagggaggcgctgctaaacattgccgagcccgagggtcgctggctgctggagctaattaacattttgcagagcatcgtagtgcaggagcgcagcctgagcctggccgagaaggtggcggcgatcaactactcggtgctgagcctgggcaagttttacgcgcgcaagatttacaagacgccgtacgtgcccatagacaaggaggtaaagatagacagcttttacatgcgcatggcgctcaaggtgctaacgctgagcgacgacctgggtgtgtaccgcaacgaccgcattcacaaggccgtgagcacaagccggcggcgcgagctaagcgaccgcgagctgatgatgagcctgcgccgggcgctggtagggggcgccgccagcggcgaagagtcctactttgacatgggggcggacctgcattggcagccgagccggcgcgccttggaggccgcctacggtccagaggacttggatgaggatgaggaagaggaggaggatgcacccgctgcggggtactgacgcctccgtaatatgtttttagatgtcccagcagcaagccccggaccccgccataagggcggcgctgcaaagccagccgtccggtctagcatcggacgactgggaggccgcgatgcaacgcatcatggccctgacgacccgcaaccccgagtcctttagacaacagccgcaggccaacagactgtcggccattttggaggcggtggtcccctctcggaccaaccccacgcacgagaaggtgctggcgatcgtgaacgcgctggcggagaacaaggccattcgtcccgacgaggccgggctggtgtacaacgccctgctggagcgcgtgggccgctacaacagcacaaacgtgcagtccaacctggaccggctggtgacggacgtgcgcgaggccgtggcgcagcgcgagcggttcaagaacgagggcctgggctcgctggtggcgctaaacgccttcctggcgacgcagccggcaaacgtgccgcgcgggcaggacgattacaccaattttatcagcgcactgcggctgatggtgaccgaggtgccccagagcgaggtgtaccagtcgggcccggactactttttccagactagcagacagggcctgcagacggtaaacctgagccaggctttcaagaacctgcgcgggctgtggggcgtgcaggcgcccgtgggcgaccggtcgacggtgagcagcttgctgacgcccaactcgcggctgctgctgctgctgatcgcacccttcaccgacagcggcagcgtaaaccgcaactcgtacctgggccacctgctgacgctgtaccgcgaggccataggccaggcgcaggtggacgagcaaaccttccaggagatcacgagcgtaagccgcgcactggggcagaacgacaccgacagtctaagggccacccttaacttcttgctgaccaatagacagcagaagatcccggcgcaatatgcgctgtcggccgaggaagaaaggattctgagatatgtgcagcagagcgtagggctgttcctgatgcaggagggggccacccccagcgccgcgctggacatgaccgcgcgcaacatggaacctagcatgtacgccgccaaccggccgtttattaataagctgatggactacctgcaccgcgcggcgtccatgaactcggactactttaccaatgccatcttgaacccgcattggctcccgccgccagggttctacacgggcgagtacgacatgcccgaccccaacgatgggtttttgtgggacgacgtggacagcgcggtgttctccccaattttgcaaaagcgccaggaggcggtgcgcacgcccgcgagcgagggcgcggtgggtcggagcccctttcctagcttgggcagcttgcatagcctgcctgactcagtaaacagcggcagggtgagtcggccgcatttgctgggcgaggacgagtacctgaacgactcgctgctgcggccgccgcgggccaagaacgccatggccaataacgggatagaaagtctggtggacaaactgaaccgctggaagacctacgctcaggaccatagggaacctgcgcccgcgccgcggcgacagcgccacgaccggcagcggggcctggtgtgggacgacgaggactcggccgacgatagcagcgtgttggacttgggcgggagcggtagggttaacccgttcgcgcatctgcagcccagactggggcgacggatgttttaaatgcaaaataaaactcaccaaggccatagcgtgcgttctcttccttgttagaaatgaggcgcgcggtggtgtcctctcctcctccctcgtacgaaagcgtgatggcgcaggcgaccctggaggttccgtttgtgcctccgcggtatatggctcctacggagggcagaaacagcattcgttactcggagctggctccgcagtacgacaccactcgcgtgtacttggtggacaacaagtcggcggacatcgcttccctcaactaccaaaacgaccacagcaacttcctaaccacggtggtgcagaacaacgatttcacccccgccgaggccagcacgcagacgataaattttgacgagcggtcccggtggggcggtgatctgaagaccattttgcacaccaacatgcccaatgtgaacgagtacatgttcaccagcaagtttaaggcgcgggtgatggtggctaggaagcacccacagggggtagctgaaacagatttaagtcaggataagcttgaatatgagtggtttgagtttaccctgcccgagggcaatttttccgagaccatgaccatagacctgatgaacaacgccatcttggaaaactacttgcaagtggggcggcaaaatggcgtgctggagagcgatattggagttaagtttgacagcagaaatttcaagctgggctgggacccggtgactaagctggtgatgccgggggtctacacatacgaggccttccatcccgacgtggtgctgctgccgggctgcggggtggacttcaccgagagccgcctgagcaaccttctgggcattcgcaagaagcaacctttccaagagggcttcaggattatgtatgaggatctagaagggggcaacatccccgccctgctggatgtggaagcatacctcaaaagcaagaatgatcgggaggaagccacccagaatgcaaacagagttgctgcaaatggaggtggtgaaattaggggagatacttttcttaccaccgaacagctaagagccgctgacaaggagctggttattaagcccattaaggaagatgctagcaagagaagctataatgtcataggggacacccatgacaccctgtaccgcagctggtacctgtcctatacctacggggaccccgagaagggggtacagtcgtggacgctgctcaccaccccggacgtcacctgcggcgcggagcaagtctactggtcgctgccggacctcatgcaagaccccgtcaccttccgctccacccagcaagtcagcaactaccccgtggttggcgccgagctcatgcccttccgcgccaagagcttttacaacgatctcgccgtctactcccagctcatccgcagctacacctccctcacccacgtcttcaaccgcttccccgacaaccagatcctgtgtcgcccgcccgcgcccaccatcaccaccgttagtgaaaacgtgcctgctctcacagatcacgggacgctaccgctgcgcagcagtatccgcggagtccagcgagtgaccgttactgacgcccgtcgccgcacctgtccctacgtctacaaggccctgggcatagtcgcgccgcgcgtgctctctagtcgcaccttttaaaaaatgtccattcttatctcgcccagcaataacaccggctggggtcttactaggcccagcaccatgtacggaggagccaagaagcgctccgatcagcaccccgttcgcgtccgcggccactttcgcgctccctggggcgcttacaagcgcgggcggacctctgcccccgccgccgtgcgcaccaccgtcgacgatgtcattgactcggtagtcgctgacgcgcgcaactacacccccgccccctccaccgtggacgcggtcattgacagcgtggtggctgacgcgcgcgactatgccagacgcaagagccggcggcgacgcattgccaggcgccaccggagcacgcccgccatgcgcgccgcccgggctctgctgcgccgtgccagacgcactggccgccgggccatgttgcaagccgcgcgtcgcgccgccgccgcacccacccccacaggcaggactcgcagacgagcggccgttgccgccgccgcggccatctctagcatgaccagacccaggcgcggaaacgtgtactgggtgcgcgactccatcacgggcgtgcgcgtgcccgtgcgcacccgtcctcctcgtccctgatctaatgcttgtgtcctcccccgcaagcgacaatgtcaaagcgcaaaatcaaggaggagatgctccaggtcgtcgccccggagatttacggaccaccccaggcggaccagaaaccccgcaaaatcaagcgggttaaaaaaaaggatgaggtggacaaggaggcagtagagtttgtgcgcgagtttgctccgcggcggcgcgtaaattggaaggggcgcagggtgcagcgcgtgttgcggcccggcacggcggtggtgttcacgcccggcgagcggtcctcggtcaggagcaagcgtagctatgacgaggtgtatggcgacgacgacatcctggaccaggcggcggagcgggcgggcgagttcgcctacgggaagcggtcgcgcgaagaggagctgatctcgctgccgctggacgagagcaaccccacgccgagcctgaagcccgtgaccctgcagcagatgctgccccaagcagtgctgctgccgagccgcggggttaagcgcgagggcgagaacatgtacccgaccatgcagatcatggtgcccaagcgtcggcgcgtggaggacgtgctggacaccgtgaaaatggatgtggagccccaggtcaaggtgcgccccatcaagcaggtggcgccgggcctgggcgtgcagaccgtggacattcaaatccccaccgacatggatgtcgacaaaaaaccctcgaccagcatcgaggtgcagaccgacccctggctcctagcctccaccgccgccacggccaccgagcctcccaggaggcgaagatggggccctgccaaccggttgatgcccaactacgtgttgcatccttccatcattccgacgccgggctaccgcggcacccggtattacgccagccgcaggcgccccgcaggcaagcgccgtcgccgcaccaccacccgccgccgtctggcccccgcccgcgtgcgccgcgtaactacgcgccggggccgctcgcttgttctgcccaccgtgcgctaccaccccagcatcctttaattcgtgtgctgtgatactgttgcagagagatggctctcacttgccgcctgcgcattcccgtcccgaattaccgaggaagatcccgccgcaggagaggcatggcaggcagcggcctaaaccgccgccggcggcgggccatgcgcaggcgcctaagtggcgggttcctgcctgcgcttatccccataatcgccgcggccattggcacgatcccgggcatagcttccgttgcgctgcaagcgtcgcagcgccgttaatgtgcaaataaagcctctttagactctgacacacctggtcctgtatatttttagaatggaagacatcaattttgcgtccctggctccgcggcacggcacgcggccgttcatgggcacctggaacgagatcggcaccagccagctgaacgggggcgccttcaattggagcagtgtctggagcgggcttaaaaatttcggctcaacgctccggacctatgggaacaaggcctggaatagtagcacagggcagatgttgagggaaaagcttgcagaccaaaacttccagcaaaaggtggtggacggcctggcctcgggcattaacggggtagtggacattgcaaaccaggccgtgcagcgcgagataaacagccgcctgaacccgcggccgcccacggtagtggagatggaagatgcaactcttccccccaggggcgagaagcggccgcggcctgacgcggaggagacaaccctgcaggtagacgagccgccctcgtacgaggaggccctcaaggccggcatgcccaccacacgcatcattgcgccaatggccacgggtgtcatgaaacccgccacccttgacctgccttcaccacccgtgcccgctccaccaaaggcagctccggttgagcaggcccccccggtggcaaccgccgtgcgccgcgttcccgcccgccgccaggcccagaactggcagagcacgctacacagtatcgtgggcctaggagtgaaaagtctgaagcgccgccgatgctattaagaaaggaaagaggacactaaagggagagcttaacttgtatgtgccttaccgccagagaacgcgcgaagatggccaccccctcgatgatgccgcagtgggcgtacatgcacatcgccgggcaggacgcctcggagtacctgagcccgggtctggtgcagtttgcccgtgccaccgacacgtacttcagcctgggcaacaagtttagaaaccccacggtggctcccacccacgatgtgaccacggaccggtcccagcgtctgacgctgcgctttgtgcccgtggatcgcgaggacaccacgtactcgtacaaggcgcgcttcactctggccgtgggcgacaaccgggtgctagacatggccagcacgtactttgacatccgcggcgtcctggaccgcggtcccagcttcaaaccctactcgggcacggcttacaacagcctggctcccaagggcgcccccaatcccagtcagtgggaacaggcaaaaacaggagctggtgtagaccaaaatcaaaaagaaactcgcacttacggcgtagccgccactggcggatataacattacaaaagaaggacttcagattggaattgatgaaactaaagaagatccaaacaacaaaatttatgcagataaaacattccagccggaaccacaaataggggaaaataattggcaggacactaatgttttctatggcggcagagctcttaaaaaggaaaccaagatgaaaccatgctatggctcatttgccagaccaactaataaaaaaggagggcaggctaaagttttaaccactgaagatggtcaacctacagaaaactttgacatagacttggctttctttgatattccacaagctggtggaaatgacaatcttgatccagatatgattctgtatgccgaaaatgtaaatctagaaacacctgacacacatgtagtttataaaccaggcaaggatgatgcaagttctgccgctaacctcacacaacagtccatgccaaacagacccaactacatcggtttcagggacaactttgtgggacttatgtattacaacagcactggcaacatgggtgtgctggctggtcaggcctctcagttaaatgctgtggtcgacttgcaagacagaaataccgagctgtcttatcagcttttattagattctctgggtgacaggaccagatactttagtatgtggaactctgcggtggacagctatgatccagatgtcaggatcattgagaatcacggtgtggaggacgaacttccaaattattgcttcccattggatggtaccggtaccaatgccacataccaaggtgtggaaccagataatgctcaaggtcaaaatgataaatggaaaaaggacgagaaagtggctgctcaaaaccaaatttgcaagggcaatatttatgccatggagattaacctccaggccaacctgtggaagagttttctgtactcgaacgtggccttgtacctgcccgactccttcaagtacacgccggccaacgtcacgctgcccactaacaccaacacctacgagtacatgaacgggcgcgtggcggccccctcgctggtggacgcctacgtcaacattggcgcccgctggtcactggaccccatggacaacgttaacccctttaaccaccaccgcaatgcgggcctgcgctaccgctccatgctgctgggcaacgggcgctacgtgcccttccatattcaagtgccccaaaagttttttgccattaagaacctgcttctgctcccgggctcctacacctacgagtggaacttccgcaaggatgttaacatgattctgcagagttcccttggcaacgacctgcgcgtcgacggtgcctccgtccgcttcgacagtgttaacctttacgccacctttttccccatggcgcacaacaccgcctccaccctggaagccatgctgcgcaacgacaccaacgaccagtccttcaacgactacctctcagccgccaacatgctttaccccatcccagccaaggccaccaacgtgcccatttccatcccctcgcgcaactgggccgcctttcgcggctggagtttcacccgcctaaaaaccaaggaaactccctccctcggctcgggttttgacccctactttgtttactcgggcaccatcccctacctcgacgggaccttctacctgaaccacacctttaagaaggtctccatcatgttcgactcctcggttagctggcccggcaacgacaggctgcttacgccgaacgagtttgaaattaagcgcagcgtcgacggggagggctataacgtggcccaatgcaacatgaccaaggactggttcctggtccagatgctttcccactacaacattggctaccagggcttccatgtgcctgagggctacaaggaccgcatgtactccttctttcgcaacttccagcccatgagtaggcaggtggttgatgagattaactacaaggattacaaggccgttgccctgcccttccagcacaacaactcgggcttcaccggctacctcgcacctaccttgcgccagggacagccgtaccccgccaacttcccctacccgcttatcggacagaccgccgtgccctccgttacccagaaaaagtttctctgcgacagggtcatgtggcgcatccccttctccagcaacttcatgtctatgggcgcccttaccgacctgggtcaaaacatgctttacgccaactcggcgcacgcgctcgacatgacctttgaggtggaccccatggatgagcccaccctcctgtatcttctctttgaagttttcgacgtggtcagagtgcaccagccgcaccgcggcgtcatcgaggccgtctacctgcgcacgcccttctccgccggcaacgccaccacctaagcatgagcggctccagcgaacaagagcttgcggccatcgtgcgcgacctgggctgcgggccctactttttgggcacccacgacaagcgcttcccgggcttccttgccggcaacaagctggcatgcgccatcgtcaacacggccggccgcgaaaccgggggcgtgcactggcttgcctttggctggaacccgcgctcgcgcacctgctacatgtttgacccctttgggttctcggaccgccggcttaagcagatttacagcttcgagtacgaggccatgttgcgtcgcagtgccctggccttatcgcccgaccgctgtcttagcctcgagcagtccacccagaccgtgcaggggcccgactccgccgcctgcggactcttttgttgcatgttcttgcatgcctttgtgcactggcccgatcgacccatggacgggaaccccaccatgaacttgctgacgggggtgcccaatggcatgctacaatcgccacaggtactgcccaccctccggcgcaaccaggagaagctctaccgcttccttgcgcaccactccccctactttcgctcccaccgcgccgccatcgaacacgccaccgcttttgataaaatgaaacaactgcgtgtataactcaaataaacagcacttttattttacatgcactggagtatatgcaagttatttaaaagtcaaaggggttctcgcgctcgtcgttgtgcgccgcgctgggaagggccacgttgcggtactggtacttgggctgccacttaaactcggggatcaccagtttaggaacagcaatctcggggaaggtctcgctccacatgcgccggctcatttgcagggcgcccagcatgtccggggcggagatcttaaaatcgcagttgggaccggtgctttgcgcgcgcgagttgcggtacacagggttgcagcactggaacaccatcagactggggtactttacgctggccagcacgctcttatcgctaatttgatccttgtccaggtcctcggcgttgctcaggccgaacggggtcatcttacacagctggcggcccaggaagggcacgctgtggggcttgtggttacactcgcagtgcacgggcattagcatcattcccgcaccgcgctgcatattcgggtatagggccttaacaaaggccataatctgcttaaaagcttgctgggccttagctccctcgctaaaaaacaggccgcagcttttcccgctaaactggttatttccgcacccggcatcttgcacgcagcagcgcgcgtcatggctggtcagttgcaccacgcttctcccccagcggttctgggtcactttggccttgctgggttgctccttcaacgcgcgctgaccgttctcgctggtcacatccatctccaccacatggtccttgtggatcattaccgtcccgtgcagacacttaagctggccttccacctcggcacagccgtggtcccacagggcactgccggtgcactcccagtttttgtgcgcgatcccgctgtggctaaagatgtaaccttgcaacaggcgacccatcacggtgctaaagctcttctgggtggtaaaggtcagttgcatcccgcgggcctcctcgttcatccaggtctggcacattttttggaatatctcggtctgctccggcataagcttgtaagcattgcgcaggccgctgtcgacgcggtagcgttccatgagcacgtttatggtatccatgcccttctcccaggacgaaaccaaaggcagactcagggggttgcgcacgttcaaaataccaggggtcgcgggctcgacaatgcgttttccgtccttgccttccttcaacagaaccggcggctggctgaatcccactcccacgatcacggcatcttcctggggcatctcttcgtcggggtttaccttggtcacatgtttggtctttctgggctgcttcttttttggagggctgtccactggaaccacgtcctcctcggaagacccggagcccacccgctgatactttcggcgcttggtgggcagaggaggtagcggcggcgaggggctcctttcctgctccggcggatagcgcgccgacccgtggccccggggcggagtggcctctcggtccataaaccggcgcacgtcctgactgccgccggccattgtttcctaggggaagatggaggagcagccgcgtaagcaggagcaggaggaggagaacttaaccacccacgagcaacccaaaattgagcaggacctgggcttggaagagccggctcgtctagaacccccacacgatgaacaggagaagaccaacgctgggctggagcatggctacctaggaggacaggaggatgtgctgctaaaacacttgcagcgccagtcctttatcctccgggacgctctggccgaccgaagcaaaacccccctcagcgtccaggagctgtgtcgggcctacgagctcaacctcttctcgccgcgcgtgccccccaaacgccagcccaacggcacctgcgagcccaacccgcgtcttaacttctaccccgtctttgcggtccccgaggcccttgccacttatcacatattttttaaaaaccaaaaaatccccgtttcctgccgcgccaaccgcacccgcgccgacgcactcctcgctctggggcccggcgcgcgcatacctgatatcgcttccctggaagaggtgcccaagatctttgaagggcttggtcgggacgagacgcgcgcggcgaacgctctaaaagaaacagcagaggaaaagggttacactagcgccctggtagagttggaaggcgataacgccaggctggccgtgcttaagcgcagcgtcgagcttacccatttcgcctaccctgccgttaacctcccgcccaaggtcatgcgtcgcatcatggatcagcttatcacgccccacattgaggcccttgatgaaagccaaaagcagcgccctgaggacgcccggcccgtggtcagcgacgaaatgcttgcgcgctggctcggaaaccgcgacccccagtccctggagcagcggcgtaagctcatgctggccgtggtcctggtcaccctcgagttggaatgcatgcgccgcttttttagcgaccccgaaaccctgcgcaaggttgaagagaccctgcactacactttcaggcacggctttgtcaggcaggcctgcaagatctctaacgtggagctaaccaacctggtctcctgcctgggtattttacacgagaaccgcctggggcagaccgtgcttcactcgaccctgaagggcgaggcgcggcgggactacatccgcgactgtgtctttctttttctttgccatacctggcagtcggccatgggcgtgtggcagcagtgtctccaggacgagaacctgaaggagctggacaagcttcttgctaaaaaccttaaaaagttatggacgggctttgacgagcgcaccgtcgcctcggacctggccgagattgtttttcctgaacgcctgaggcagacgcttaaaggcgggctgcccgactttatgagccagagcatgttgcaaaactaccgcactttcattctcgagcgatcgggaatcctgcccgccacctgcaacgccttcccctccgactttgtcccgctgagctaccgccagtgtcccccgccgctgtggagccactgctacctcttgcagctggccaactacatcgcccaccactcggacgtgatcgaggacgtaagcggcgaggggctgcttgagtgccactgccgctgcaacctgtgctccccgcaccgctccctggtctgcaacccccagctcctaagcgagacccaggtcatcggtacctttgagctgcaaggtccggaaaactccaccactccgctgaaacttacgccggggttgtggacttccgcgtacctgcgcaaatttgtaccccaggactaccacgcccacgagataaagttctttgaggaccaattgtgcccacagcacgcggatcttacggcctgcgtcatcacccagggcgcaatcctcgcccaattgcacgccatccaaaaatcccgccaagagtttcttctaaaaaagggtaaaggggtttacctggacccccagacaggcgaagtgcttaacccgggtcttccccagcatgccgaggaagaagcaggagccactagtggaggagatggaagaagaatgggacagccaggcagaggaggacgaatgggaggaggaggaggaagaattggaagaggtgcaacaggagcaggcaacagagcagcccgtcgccgcaccatccgcgccggcagcccctccggtcaagcctcctcgtagatgggatcaagtgaagggtgacggtaagcaccagcggcagggctaccgatcatggagggcccacaaagccgcgatcattgcctgcttgcaagactgcggggggaacattgcttttgcccgccgctacctgcttttccaccgcggggtaaacatcccccgcaacgtgttgcattactaccgtcaccttcacagctaacaaaaagcaagtaagaggagtcgccggaagaggaggcctcaggattgcggcggacgagcccttcaccaccagggagctaagaaaccgaatattccccactctttatgccatttttcagcagagtcgaggtcagcagcaagagcttaaagtaaaaaatcggtctctgcgctcgctcacccgcagttgcttgtaccacaaaaacgaagatcagctgcagcgcactcttgaagacgccgaggctttgtttcacaagtactgcgcgctcactcttaaagactaaggcgcgcccacccgaaaaaaaggcgggaattacctcatcgccagcaccatgagcaaggagattcccacgccttacatgtggagctatcagccccagatgggcctagccgcgggcgcctcccaggactactccacccgcatgaactggctcagtgccgggccctcaatgatctcacaggtcaacgggatccgtaaccatcgaaaccagatattgttggagcaggcggcagtcacctccacgcccagggcaaagcttaacccgcgtaattggccctccaccctggtgtaccaggaaattcccgggccaactaccgtactacttccgcgtgacgcactggccgaagtccgcatgactaactcaggtgtccagctggccggcggcgcttcccggtgcccgctccgcccacaatcgggtataaaaaccctggtgatccgaggcaaaggcacacagcttaacgacgagttggtaagctctgcaatcggtctgcgacctgatggagtgtttcaactagccggagccgggaaatcgtcctttactcccaaccaggcctacctgaccttgcagagcagctcttcggagcctcgctccggaggcattggaaccctccagtttgtgcaggagtttgtgccctcggtctactttaaccccttctcgggatcgccaggcctttacccggacgagtttataccgaactttgacgcagtgagagaagcggtggacggctacgactaaatgtcctatggtgactcggctgagcttgctcggttaaggcatctggaccactgccgccgcctgcactgctttgcccgggagagctgcgggcttatctactttgagcttcccaaggagcaccccaacggccctgcacacggagtgcggattaccgtagagggcaccaccgagtctcacctggttaggttcttcacccagcaacccttcctggtcgagcgggaccgggctgcaaccacctacaccgtgtactgcatttgtccaaccccgaagttgcatgaaaatttttgctgtactctttgtggtgagtttaataaaagctgaaataagactctactctggaatccagtgtcgtcataatcgcaccgagaccattaactttaccacccaggaacaggtgaactttacctgcaaactccacaagaagtacctcatatggtttttcaacaacactactcttgcagtagttaacacctgtgacaacgacggtgttcttcttcccaacaatctcaccagtggactagccttctctgttaaaagggcaaagctaattcttcattgccctataactgatttaagcccaaaaaccaatcaaacccccttttcccatctacccaaataaacatttattggaaataattattcaataaagatcacttacttaaaatctgaaagtatgtctttggtgtagttgtttagcagcacctcagtcccctcctcccagctctggtactccagtccccggcgggcggcaaactttctccacaccttgaaagggatgtcaaattcctggtccacaattttcattgtcttccctcttagatgacaaagagactccgggtggaagatgacttcaaccccgtctacccctatggctacgcgcggaatcaaaatattcccttcctcactcccccctttgtctcctccaatggatttcaaaacttcccccctggggtcctgtcacttaaactggctgacccaatcaccattaacaatcaaaatgtatcactcaaggttggaggggggctaactttgcaagaagaaactggaaaattaacagttaatactgaaccacctttgcatcttacaaataacaaattagggatagctttagacgctccatttgatgttatagacaataagcttacactattagcaggccatggcttgtctattataacaaaagaaacatcaacactgcctggcttggttaatactcttgtagtattaactggaaagggtattggaacagatttatcaaataatggtggaaatatatgtgttagagttggagaaggcggcggcttatcatttaatgacaatggagacttggtagcatttaataaaaaagaagacaaacgcaccctatggacaactccagacacatctccaaattgcagaattgatcaggataaggactctaagctaactttggtccttacaaagtgtggaagtcaaatattagccaatgtgtcattaattgttgtagctggaaggtacaaaattatcaataacaatactaatccagctcttaaaggatttaccattaaattgttgtttgataaaaatggagtccttatggaatcttcaaatcttggtaaatcatattggaactttcgaaatcaaaattcaattatgtcaacagcttatgaaaaagctattggttttatgcctaatttggtagcctatccaaaacctaccactggctctaaaaaatatgcaagagatatagtttatggaaacatctaccttggcggaaagccacatcaaccagtaaccattaaaactacctttaaccaggaaactggatgtgaatactctattacatttgattttagttgggccaaaacttatgtaaatgttgaatttgaaactacctcttttaccttttcctatattgcccaagaataaaggataaataaacgtgtttttcatttaaaaatttcatgtatctttattgatttttacaccagcgcgggtacacattctcccaccaccagcccattttacagtgtaaacaattctctcagcacgggtggccttaaataggggaaagttctcattagtgcgggaactggacttggggtttataatccacacagtttcctggcgagccaaacgggggtcggtgattgagatgaagccgtcctttgaaaaatcatccaagtgggcctcgcagtccaaggtcacagtctggtggaatgagaagaacgcacagactcatactcggaaaacaaaatgggtctgtgcctctccatcagcgcccttaacagtctctgccgccggggctcggtgcggctgctacagatgggatcgggatcgcaagtctctttcactataatccccacagcctttagcattagtcttctggtgcgtcgggcacagcaccgcatcctaatctcgctcatgttttcacagtaagtgcagcacataatgaccatgttattcagcagcccataatttagggtgctccagccaaagcttatgttggaaatgatggaacccacgtgaccatcgtaccaaatgcggcagtatatcaggtgcctgccccttataaacacactgcccatatacataatctctttggacatgtttctatttacaatctgccggtaccaggggaagcgctggttgaacatgcacccgtaaatgactctcctaaaccacacggccagcagggtgcctcccgcccggcactgcagggagcccggggataaacagtggcaatgcaggatccagcgctcgtacccgcttaccatctgggctcttaccagatccagggtagcgggacacaggcacactgacatacatctttttaaaatttttatttcctttcgggtcaggatcatatcccaggggactggaaactcttggagcagggtaaaaccagcagcacatggtaatccacggacagaacttacattatgataatctgcatgatcacaatcgggcaatacagggtgttgttcagtcaaagaggccctggtctccttatcatatcgtggtaaacgggccctgcgatatggataatggcggagcaaggttgattgttccttggtgctcattgtagcgcaccctcttgcgtacctcgttgtacttttgccagcagaaagtggccctggaacagcaaatacctctcctccgaccgtcctttcgctgttgccgctcagtcatccaactgaagtacatccattcccaaaggttgtgaagaagttcctttgtatctaatgaaacaaaaagcccgtccatgcggattcccctcatcacatcagccaggactctgtaggccatccccatccagttaatgctgccttgtctatcatttaaagggggcggtggcaaaattggaagaaccatttttattccaaacggtctcgaaggacgataaagtgcaagtcacgcaggtgacagcgttcaccgccgctgtgttggtggaaacatacagccaggtcaaaacccactctattttcaaggtgctcgactgtggcttcgagcagtggctctacgcgtacatccagcataagaatcacattaaaagccggccctccatcgatttcatcaatcatcatgttacattcctgcaccatccccaggtaattctcatttttccagccttggattatttctacaaattgttggtgtaagtccactccgcacatgtggaaaagctcccatagcgccccctccactttcataatcaggcagaccttcataatagaaacaaatcctgctgctccaccacctgcagcgtgtttaaaacaacaacatttaataaggttctgccctcagcccttagctgacgtctaagtgtcagctgcaaaaagtcacttaagtcctgggccactacagctgacaattcagagccagggctaagcgtgggactggcaagcgtaagggagtactttaatgctccaaagctagcacctaaaaactgcatgctggaataagctctttttgtatctccggtaatgccttccaaaatgtgagtaataaagcgaggtagtttttctttaatcatgttagtaatagaaaaatcctctaaatacgtcactaggaccccagggaccacaatgtggtagcttacaccgcgtcgctgaagcatggttagtagagatgaaagtctgaaaaacaaaaagcatgcgctaaaccaaggtggctatttttactgaaggaaaaattactttttttagcagcagggtgcccactgggtggcccttgcggacatacaaaaattggtccgtgtgattaaaaagcagtacagcaagctcctgtcttctcccggcaaaaatcacatcggactgggttagtatgcccctggcatggtagtcatttaaagccataaatgtgccctgataaccagtaggaacgagtacactgacttttaggtaaaccaataccaccccatgcggaaaaatataaaaagattcaggacaaaaaaaggtatatttattgctagccccttcctggacgggagccatccctccagggctatctataaaagcatagagacattcagccatagcttagcccgcttaccagtagacaaagagcacagcagtacaagcgccaacagcaataactacttactgtgccagctcagtacttaaaggcagcttacactgacgtaatgaccaaaggtgtaaaaaccccgccaaaaaaaaacacacacgccctaggtgtttttcgtaaaaacacttccgcgttctcacttcctcgtatcaattttgtgacttaacttccgggttcccacgttacgtcacttttgcccttacatgtgactgtgccatagggcgccattttcccgtgcccaatatggctaaagtccgcttttttatacgtcatcggccccgcgacttgcttccgggttgggccacgcctttgcggcaaccgccggccgtacgtcttgacgtcaactgcattaccgcttgttaaccacttaacgttggccctgccctaaaaccgttaaaatttaaaagctcatttgcatattaacttttgtttactttgtggggtggatttataggtgggccagtgaattgtaatacgactcactatagggcgaattgggccctctagatgcatgctcgagcggccgccagtgtgatggatatctgcagaattcgcccttccttaattaacctgcag

SEQ ID NO: 19 - DNA, 35325 bp, Adenovirus D9
  MISC_FEATURE (1)..(35325): Complete Genome
ctgcaggttaattaaggaagggcgaattctgcagatatccatcacactggcggccgctcgagcatgcatctagagggcccaattcgccctatagtgagtcgtattacaattcactggccccatctatataatataccccacaaagtaaacaaaagttaatatgcaaatgagcttttgaattttaacggtttcggggcggagccaacgctgattggacgagagaagacgatgcaaatgacgtcacgacgcacggctaacggtcgccgcggaggcgtggcctagcccggaagcaagtcgcggggctgatgacgtataaaaaagcggactttagacccggaaacggccgattttcccgcggccacgcccggatatgaggtaattctgggcggatgcaagtgaaattaggtcattttggcgcgaaaactgaatgaggaagtgaaaagcgaaaaataccggtccctcccagggcggaatatttaccgagggccgagagactttgaccgattacgtgggggtttcgattgcggtgtttttttcgcgaatttccgcgtccgtgtcaaagtccggtgtttatgtcacagatcagctgatccgcagggtatttaaaccagtcgagtccgtcaagaggccactcttgagtgccagcgagtagagatttctctgagctccgctcccagagaccgagaaaaatgagacacctgcgcctcctgccttcaactgtgcccggtgagctggctgtgcttatgctggaggactttgtggatacagtattggaggacgaactgcatccaagtccgttcgagctgggacccacacttcaggatctctatgatctggaggtagatgcccatgatgacgaccctaacgaggaggctgtgaatttaatatttccagaatctatgattcttcaggctgacatagccaacgaatctactccacttcatacaccgactctgtcacccatacctgaattggaagaggaggacgaactagacctccggtgttatgaggaaggttttcctcccagcgattcagaggatgaacggggtgagcagaccatggctctgatctcagactatgcttgtgtgattgtggaggagcaagatgtgattgaaaaatctactgagccagtacaaggctgtaggaactgccagtaccaccgggataagtccggagatgtgaacgcctcctgcgctttgtgctatatgaaacagactttcagctttatttacagtaagtggagtgaatgtgagagaggctgagtgcttaacacataactgtaatgcttgaacagctgtgctaagtgtggtttattttgttactaggtccggtgtcagaggatgagttatcaccctcagaagaagaccacccgtctccccctgagctgtcaggcgaaacgcccctgcaagtgttcagacccaccccagtcagacccagtggcgagaggcgagcggctgttgacaaaattgaggacttgttgcaggacatgggtggggatgaacctttggacctgagcttgaaacgccccaggaactagacgcagctgcgcttagtcatgtgtaaataaagttgtacaataaaagtctatgtgacgcatgcaaggtgtggtttatgactcatgggcggggcttagtcctatataagtggcaacacctgggcacttgggcacagaccttcagggagttcctgatggatgtgtggactatccttgcagactttagcaagacacgccggcttgtagaggatagttcagacgggtgctccgggttctggagacactggtttggaactcctctatctcgcctggtgtacacagttaagaaggattataaagaggaatttgaaaatatttttgctgactgctctggcctgctagattctctgaatcttggccaccagtcccttttccaggaaagggtactccacagccttgatttttccagcccagggcgcactacagccggggttgcttttgtggtttttctggttgacaaatggagccaggacacccaactgagcaggggctacatcctggacttcgcagccatgcacctgtggagggcctggatcaggcagcggggacagagaatcttgaattactggcttctacagccagcagctccgggtcttcttcgtctacacagacaaacatccatgttggaggaagaaatgaggcaggccatggacgagaacccgaggagcggcctggaccctccgtcggaagaggagctggattgaatcaggtatccagcctgtacccagagcttagcaaggtgctgacatccatggccaggggagttaagagggagaggagcgatgggggtaataccgggatgatgaccgagctgacggccagcctgatgaatcggaagcgcccagagcgccttacctggtacgagctacagcaggagtgcagggatgagttgggcctgatgcaggataaatatggcctggagcagataaaaacccattggttgaacccagatgaggattgggaggaggctattaagaagtatgccaagatagccctgcgcccagattgcaagtacatagtgaccaagaccgtgaatatcagacatgcctgctacatctcggggaacggggcagaggtggtcatcgataccctggacaaggccgccttcaggtgttgcatgatgggaatgagagcaggagtgatgaatatgaattccatgatcttcatgaacatgaagttcaatggagagaagtttaatggggtgctgttcatggccaacagccacatgaccctgcatggctgcagtttcttcggcttcaacaatatgtgcgcagaggtctggggcgcttccaagatcaggggatgtaagttttatggctgctggatgggcgtggtcggaagacccaagagcgagatgtctgtgaagcagtgtgtgtttgagaaatgctacctgggagtctctaccgagggcaatgctagagtgagacactgctcttccctggagacgggctgcttctgcctggtgaagggcacagcctctctgaagcataatatggtgaagggctgcacggatgagcgcatgtacaacatgctgacctgcgattcgggggtctgccatatcctgaagaacatccatgtgacctcccaccccagaaagaagtggccagtgtttgagaataacctgctgatcaagtgccatatgcacctgggagccagaaggggcaccttccagccgtaccagtgcaactttagccagaccaagctgctgttggagaacgatgccttctccagggtgaacctgaacggcatctttgacatggatgtctcggtgtacaagatcctgagatacgatgagaccaagtccagggtgcgcgcttgcgagtgcgggggcagacacaccaggatgcagccagtggccctggatgtgaccgaggagctgagaccagaccacctggtgatggcctgtaccgggaccgagttcagctccagtggggaggacacagattagaggtaggtcgagtgagtagtgggcgtggctaaggtgactataaaggcgggtgtcttacgagggtctttttgcttttctgcagacatcatgaacgggaccggcggggccttcgaaggggggctttttagcccttatttgacaacccgcctgccgggatgggccggagttcgtcagaatgtgatgggatcgacggtggatgggcgcccagtgcttccagcaaattcctcgaccatgacctacgcgaccgtggggagctcgtcgctcgacagcaccgccgcagccgcggcagccgcagctgccatgacagcgacgagactggcctcgagctacatgcccagcagcggcagcagcccctctgtgcccagttccatcatcgccgaggagaaactgctggccctgctggccgagctggaagccctgagccgccagctggccgccctgacccagcaggtgtccgagctccgcgagcagcaacagcagcaaaataaatgattcaataaacacagattctgattcaaacagcaaagcatctttattatttattttttcgcgcgcggtaggccctggtccacctctcccgatcattgagagtgcggtggattttttccaggacccggtagaggtgggattggatgttgaggtacatgggcatgagcccgtcccgggggtggaggtagcaccactgcatggcctcgtgctctggggtcgtgttgtagatgatccagtcatagcaggggcgctgggcgtggtgctggatgatgtctttgagaaggagactgatggccacggggagccccttggtgtaggtattggcgaagcggttgagctgggagggatgcatgcggggggagatgatgtgcagtttggcctggatcttgaggttggcgatgttgccacccagatcccgccgggggttcatgttgtgcaggaccaccaggacggtgtagcccgtgcacttggggaacttgtcatgcaacttggaagggaatgcgtggaagaatttggagacgcccttgtgcccgcccaggttttccatgcattcatccatgatgatggcgatgggcccgtgggctgcggctttggcaaagacgtttctggggtcagatacatcataattatgctcctgggtgagatcatcataagacattttaatgaatttggggcggagggtgccagattgggggacgatggttccctcgggccccggggcgaagttcccctcacagatctgcatctcccaggctttcatctcggagggggggatcatgtccacctgcggggcgatgaaaaaaacggtttccggggctggggtgatgagctgcgaagagagcaggtttctcaacagctgggacttgccgcacccggtcgggccgtagatgaccccgatgacgggttgcaggtggtagttcaaggacatgcagctgccgtcgtcccggaggaggggggccacctcgttgagcatgtctctgacttggaggttttcccgaacgagctcgccgaggaggcggtccccgcccagcgagaggagctcttgcagggaagcaaagtttttcaggggcttgagtccgtcggccatgggcatcttggcgagggtctgcgagaggagctccaggcggtcccagagctcggtgacgtgctctacggcatctcgatccagcagacttcctcgtttcgggggttgggacgactgcgactgtagggcacgagacgatgggcgtccagcgcggccagcgtcatgtccttccagggtctcagggtccgagtgagggtggtctccgtcacggtgaaggggtgggcccctggctgggcgcttgcaagggtgcgcttgagactcatcctgctggtgctgaaacgggcacggtcttcgccctgcgagtcggcgagatagcagttgaccatgagctcgtagttgagggcctcggcggcgtggcccttggcgcggagcttgcccttggaagagcgcccgcaggcgggacagaggagggattgcagggcgtagagcttgggggcgagaaagacggactcgggagcgaaagcgtccgctccgcagtgggcgcagacggtctcgcactcgacgagccaggtgagctctggctgctcggggtcaaaaaccagttttcccccgttctttttgatgcgcttcttacctcgcgtctccatgagtctgtgtccgcgctcggtgacaaacaggctgtcggtgtccccgtagacggacttgattggcctgtcctgcaggggcgtcccgcggtcctcctcgtagagaaactcggaccactctgagacaaaggcgcgcgtccacgccaagacaaaggaggccacgtgcgaggggtagcggtcgttgtccactagggggtccaccttttccaccgtgtgcagacacatgtccccctcctccgcatccaagaaggtgattggcttgtaggtgtaggccacgtgaccgggggtccccgacgggggggtataaaagggggcgggtctgtgctcgtcctcactctcttccgcgtcgctgtccacgagcgccagctgttggggtaggtattccctctcgagagcgggcatgacctcggcactcaggttgtcagtttctagaaacgaggaggatttgatgttggcttgccctgccgcgatgctttttaggagactttcatccatctggtcagaaaagactatttttttattgtcaagcttggtggcgaaggagccatagagggcgttggatagaagcttggcgatggatctcatggtctgatttttgtcacggtcggcgcgctccttggccgcgatgtttagctggacatactcgcgcgcgacgcacttccattcggggaagacggtggtgcgctcgtcgggcacgatcctgacgcgccagccgcggttatgcagggtgaccaggtccacgctggtggccacctcgccgcgcaggggctcgttggtccagcagagtctgccgcccttgcgcgagcagaacgggggcagcacatcaagcagatgctcgtcaggggggtccgcatcgatggtgaagatgcccggacagagttccttgtcaaaataatcgatttttgaggatgcatcatccaaggccatctgccactcgcgggcggccagcgctcgctcgtaggggttgaggggcggaccccagggcatgggatgagtgagggcggaggcgtacatgccgcagatgtcgtagacatagatgggctccgagaggatgccgatgtaggtgggataacagcgccccccgcggatgctggcgcgcacgtagtcatacaactcgtgcgagggggccaagaaggcggggccgagattggtgcgctggggctgctcggcgcggaagacgatctggcgaaagatggcgtgcgagttggaggagatggtgggccgttggaagatgttaaagtgggcgtggggcaagcggaccgagtcgcggatgaagtgcgcgtaggagtcttgcagcttggcgacgagctcggcggtgacgaggacgtccatggcgcagtagtccagcgtttcgcggatgatgtcataacccgcctctcctttcttctcccacagctcgcggttgagggcgtactcctcgtcatccttccagtactcccggagcgggaatcctcgatcgtccgcacggtaagagcccagcatgtagaaatggttcacggccttgtagggacagcagcccttctccacggggagggcgtaagcttgagcggccttgcggagcgaggtgtgcgtcagggcgaaggtgtccctgaccatgactttcaagaactggtacttgaaatccgagtcgtcgcagccgccgtgctcccagagctcgaaatcggtgcgcttcttcgagagggggttaggcagagcgaaagtgacgtcattgaagagaatcttgcctgctcgcggcatgaaattgcgggtgatgcggaaagggcccgggacggaggctcggttgttgatcacctgggcggcaaggacgatctcgtcgaagccgttgatgttgtgcccgacgatgtagagttccatgaatcgcgggcggcctttgatgtgcggcagctttttgagctcctcgtaggtgaggtcctcggggcattgcaggccgtgctgctctagcgcccactcctggagatgtgggttggcttgcatgaaggaagcccagagctcgcgggccatgagggtctggagctcgtcgcgaaagaggcggaactgctggcccacggccatcttttctggggtgacgcagtagaaggtgagggggtcccgctcccagcgatcccagcgtaagcgcacggcgagatcgcgagcgagggcgaccagctcgggttcccccgagaatttcatgaccagcatgaaggggacgagctgcttgccgaaggaccccatccaggtgtaggtttctacatcgtaggtgacaaagagccgctccgtgcgaggatgagagccgattgggaagaactggatttcctgccaccagttggacgagtggctgttgatgtgatgaaagtagaaatcccgccggcgaaccgagcactcgtgctgatgcttgtaaaagcgtccgcagtactcgcagcgctgcacgggctgtacctcatccacgagatacacagcgcgtcccttgaggaggaacttcaggagtggcggccctggctggtggctttcatgttcgcctgcgtgggactcaccctggggctcctcgaggacggagaggctgacgagcccgcgcgggagccaggtccagatctcggcgcggcgggggcggagagcgaagacgagggcgcgcagttgggagctgtccatggtgtcgcggagatccaggtccgggggcagggttctgaggttgacctcgtagaggcgggtgagggcgtgcttgagatgcagatggtacttgatctccacgggtgagttggtggtcgtgtccacgcattgcatgagcccgtagctgcgcggggccacgaccgtgccgcggtgcgcttttagaagcggtgtcgcgggcgtgctcccggcggcagcggcggttctggccccgcgggcaggggcggcagaggcacgtcggcgtggcgctcgggcaggtcccggtgctgcgccctgagagcgctggcgtgcgcgacgacgcggcggttgacatcctggatctgccgcctctgcgtgaagaccacgggccccgtgactttgaacctgaaagacagttcaacagaatcaatctctgcgtcattgacggcggcctgacgcaggatctcttgcacgtcgcccgagttgtcctggtaggcgatctcggtcatgaactgttcgatctcctcctcctggagatcgccgcggcccgcgcgctccacggtggcggcgaggtcattggagatgcggcccatgagctgcgagaaggcgcccaggccgctctcgttccagacgcggctgtagaccacgtccccgtcggcgtcgcgtgcgcgcatgaccacctgcgcgaggttgagctccacgtgccgcgtgaagacggcgtagttgcgcaggcgctggaagaggtagttgagggtggtggcgatgtgctcggtgacgaagaagtacatgatccagcggcgcaggggcatctcgctgatgtcgccgatggcctccagcctttccatggcctcgtagaaatccacggcgaagttgaaaaactgggcattgcgggccgagaccgtgagctcgtcttccaggagccggatgagctcggcgatggtggcgcgcacctcgcgctcgaaatccccgggggcctcctcttcttcctcttcttccatgacgacctcttcttctatttcttcctctgggggcggtggtggtggcggggcccgacgacgacggcgacgcaccgggagacggtcgacgaagcgctcgatcatctccccgcggcggcgacgcatggtttcggtgacggcgcgaccccgttcgcgaggacgcagcgtgaagacgccgccggtcatctcccggtaatggggcgggtccccgttgggcagcgatagggcgctgacgatgcatcttatcaattgcggtgtaggggacgtgagcgcgtcgagatcgaccggatcggagaatctttcgaggaaagcgtctagccaatcgcagtcgcaaggtaagctcaaacacgtagcagccctgtggacgctgttagaattgcggttgctgatgatgtaattgaagtaggcgtttttgaggcggcggatggtggcgaggaggaccaggtccttgggtcccgcttgctggatgcggagccgctcggccatgccccaggcctggccctgacaccggctcaggttcttgtagtagtcatgcatgagcctctcgatgtcatcactggcggaggcggagtcttccatgcgggtgaccccgacgcccctgagcggctgcacgagcgccaggtcggcgacgacgcgctcggcgaggatggcctgttgcacgcgggtgagggtgtcctggaagtcgtccatgtcgacaaagcggtggtaggccccggtgttgatggtgtaggtgcagttggccatgagcgaccagttgacggtctgcaggccgggttgcacgacctcggagtacctgagccgcgagaaggcgcgcgagtcgaagacgtagtcattgcaggtgcgcacgaggtactggtagccgactaggaagtgcggcggcggctggcggtagagcggccagcgctgggtggccggcgcgcccggggccaggtcctcgagcatgaggcggtggtagccgtagaggtagcgggacatccaggtgatgccggcggcggtggtggaggcgcgcgggaactcgcggacgcggttccagatgttgcgcagcggcaggaaatagtccatggtcggcacggtctggccggtgagacgcgcgcagtcattgacgctctagaggcaaaaacgaaagcggttgagcgggctcttcctccgtagcctggcggaacgcaaacgggttaggccgcgtgtgtaccccggttcgagtccccttgaatcaggctggagccgcgactaacgtggtattggcactcccgtctcgacccgagcccgatagccgccaggatacggcggagagtcctttttgccggccaaggggggtcgctagacttgaaagcgaccgaaaaccctgccgggtagtggctcgcgcccgtagtctggagaagcatcgccagggttgagtcgcggcagaacccggttcgcggacggccgcggcgagcgggacttggtcaccccgccgatttaaagacccacagccagccgacttctccagttacgggagcgagcccccttttttctttttgccagatgcatcccgtcctgcgccaaatgcgtcccacccccccggcgaccaccgcgaccgcggccgtagcaggcgccggcgctagccagccacagccacagacagagatggacttggaagagggcgaagggctggcgagactgggggcgccgtccccggagcgacacccccgcgtgcagctgcagaaggacgtgcgcccggcgtacgtgcctgcgcagaacctgttcagggaccgcagcggggaggagcccgaggagatgcgcgactgccggtttcgggcgggcagggagctgcgcgagggcctggaccgccagcgcgtgctgcgcgacgaggatttcgagccgaacgagcagacggggatcagccccgcgcgcgctcacgtggcggcggccaacctggtgacggcctacgagcagacggtgaagcaggagcgcaacttccaaaagagtttcaacaaccacgtgcgcaccctgatcgcgcgcgaggaggtggccctgggcctgatgcacctgtgggacctggcggaggccatcgtgcagaacccggacagcaagcctctgacggcgcagctgttcctggtggtgcagcacagcagggacaacgaggcgttcagggaggcactgctgaacatcgccgagcccgagggtcgctggctgctggagctgatcaacatcttgcagagcatcgtagtgcaggagcgcagcctgagcttggccgagaaggtggcggcgatcaactactcggtgctgagcctgggcaagttttacgcgcgcaagatttacaagacgccgtacgtgcccatagacaaggaggtgaagatagacagcttttacatgcgcatggcgctcaaggtgctgacgctgagcgacgacctgggcgtgtaccgcaacgaccgcatccacaaggccgtgagcacgagccggcggcgcgagctaagcgaccgcgagctgatgctgagcctgcgccgggcgctggtagggggcgctgccggcggcgaggagtcctacttcgacatgggggcggacctgcattggcagccgagccggcgcgccttggaggccgcctacggtccagaggacttggatgaggaagaggaagaggaggaggatgcacccgctgcggggtactgacgcctccgtgatgtgtttttagatgcagcaagccccggaccccgccataagggcggcgctgcaaagccagccgtccggtctagcatcggacgactgggaggccgcgatgcaacgcatcatggccctgacgacccgcaaccccgagtcctttagacaacagccgcaggccaacagactctcggccattctggaggcggtggtcccctctcggaccaaccccacgcacgagaaggtgctggcgatcgtgaacgcgctggcggagaacaaggccatccgtcccgacgaggccgggctggtgtacaacgccctgctggagcgcgtgggccgctacaacagcacgaacgtgcagtccaacctggaccggctggtgacggacgtgcgcgaggccgtggcgcagcgcgagcggttcaagaacgagggcctgggctcgctggtggcgctgaacgccttcctggcgacgcagccggcgaacgtgccgcgcgggcaggacgattacaccaactttatcagcgcgctgcggctgatggtgaccgaggttccccagagcgaggtgtaccagtcgggcccggactactttttccagacgagccggcagggcttgcagacggtgaacctgagccaggctttcaagaacctgcgagggctgtggggcgtgcaggcgcccgtgggcgaccggtcgacggtgagcagcttgctgacgcccaactcgcggctgctgctgctgctgatcgcgcccttcaccgacagcggcagcgtgaaccgcaactcgtacctgggccatctgctgacgctgtaccgcgaggccataggccaggcgcaggtggacgagcagaccttccaggagatcactagcgtgagccgcgcgctggggcagaacgacaccgacagtctgagggccaccctgaacttcttgctgaccaatagacagcagaagatcccggcgcaatatgcgctgtcggccgaggaggaaaggatcctgagatatgtgcagcagagcgtagggctgttcctgatgcaggagggggccacccccagcgccgcgctggacatgaccgcgcgcaacatggaacctagcatgtacgccgccaaccggccgttcatcaataagctgatggactacctgcaccgcgcggcggtcatgaacacggactactttacaaacgccatcctgaacccgcactggctcccgccgccggggttctacacgggcgagtacgacatgcccgaccccaacgacgggttcctgtgggacgacgtggacagcgtggtgttctcgccgacctttcaaaagcgccaggaggcgccgccgagcgagggcgcggtggggaggagcccctttcctagcttagggagtttgcatagcttgccgggctcggtgaacagcggcagggtgagccggccgcgcttgctgggcgaggacgagtacctgaacgactcgctgctgcagccgccgcgggccaagaacgccatggccaataacgggatagagagtctggtggacaaactgaaccgttggaagacctacgctcaggaccatagggatgcgcccgcgccgcggcgacagcgccacgaccggcagcggggcctggtgtgggacgacgaggactcggccgacgatagcagcgtgttggacttgggcgggagcggtggggtcaacccgttcgcgcatctgcagcccaaactggggcgacggatgttttgaaatgcaaaataaaactcaccaaggccatagcgtgcgttctcttccttgttagagatgaggcgtgcggtggtgtcttcctctcctcctccctcgtacgagagcgtgatggcgcaggcgaccctggaggttccgtttgtgcctccgcggtatatggctcctacggagggcagaaacagcattcgttactcggagctggctccgcagtacgacaccactcgcgtgtacttggtggacaacaagtcggcggacatcgcttccctgaactaccaaaacgaccacagcaacttcctgaccacggtggtgcagaacaacgatttcacccccgccgaggccagcacgcagacgataaattttgacgagcggtcgcggtggggcggtgatctgaagaccattctgcacactaacatgcccaatgtgaacgagtacatgttcaccagcaagtttaaggcgcgggtgatggtggctaggaagcatccagagggggtagttgaaacagatttgagtcaggataagcttgaatatgagtggtttgagtttaccctgcccgagggaaacttttccgagaccatgaccatagacctgatgaacaacgccatcttggaaaactacttgcaagtggggcggcaaaatggcgtgctggagagcgatatcggagtcaagtttgacagcagaaatttcaagctgggctgggacccggtgaccaagctggtgatgccaggggtctacacctacgaggccttccacccggacgtggtgctgctgccgggctgcggggtggacttcaccgagagccgcctgagcaacctcctgggcattcgcaagaagcaacctttccaagagggcttcagaatcatgtatgaggatctagaaggtggcaacatccccgccctccttgatgtgcccaagtacttggaaagcaagaagaaagttgaagacgaaactaaaaatgcagctgcggctacagccgatacaaccactaggggtgatacatttggaactccagcgcaagagacagcagctgataagaaggtagaagtcttgcccattgaaaaggatgagagtggtagaagttacaacctgatccaggggacccacgacacgctgtaccgcagttggtacctgtcctatacctacggggaccccgagaagggggtgcagtcgtggacgctgctcaccaccccggacgtcacctgcggcgcggagcaagtctactggtcgctgccggacctcatgcaagacccagtcaccttccgctctacccagcaagtcagcaactaccccgtggtcggcgccgagctcatgcccttccgcgccaagagcttttacaacgacctcgccgtctactcccagctcatccgcagctacacctccctcacccacgtcttcaaccgcttccccgacaaccagatcctctgccgcccgcccgcgcccaccatcaccaccgtcagtgaaaacgtgcctgctctcacagatcacgggacgctaccgctgcgcagcagtatccgcggagtccagcgagtgaccgtcactgacgcccgtcgccgcacctgtccctacgtctacaaggccctgggcatagtcgcgccgcgcgtgctttccagtcgcaccttctaaaaaaatgtctattctcatctcgcccagcaataacaccggctggggtcttactagacccagcaccatgtacggaggagccaagaagcgctcccagcagcaccccgtccgcgtccgcggccacttccgcgctccctggggcgcttacaagcgcgggcggacttccaccgccgtgcgcaccaccgtcgacgacgtcatcgactcggtggtcgccgacgcgcgcaactatacccccgccccctccaccgtggacgcggtcatcgacagcgtggtggccgacgcgcgcgactatgccagacgcaagagccggcggcgacggatcgccaggcgccaccggagcacgcccgccatgcgcgccgcccgggctctgctgcgccgcgccagacgcacgggccgccgggccatgatgcgagccgcgcgccgcgctgccactgcacccacccccgcaggcaggactcgcagacgagcggccgccgccgccgccgcggccatctctagcatgaccagacccaggcgcggaaacgtgtactgggtgcgcgactccgtcacgggcgtgcgcgtgcccgtgcgcacccgtcctcctcgtccctgatctaatgcttgtgtcctcccccgcaagcgacgatgtcaaagcgcaaaatcaaggaggagatgctccaggtcgtcgccccggagatttacggaccaccccaggcggaccagaaaccccgcaaaatcaagcgggttaaaaaaaaggatgaggtggacgagggggcagtagagtttgtgcgcgagttcgctccgcggcggcgcgtaaattggaaggggcgcagggtgcagcgcgtgttgcggcccggcacggcggtggtgttcacgcccggcgagcggtcctcagtcaggagcaagcgtagctatgacgaggtgtacggcgacgacgacatcctggaccaggcggcggagcgggcgggcgagttcgcctacgggaagcggtcgcgcgaagaggagctgatctcgctgccgctggacgaaagcaaccccacgccgagcctgaagcccgtgaccctgcagcaggtgctgccccaggcggtgctgctgccgagccgcggggtcaagcgcgagggcgagagcatgtacccgaccatgcagatcatggtgcccaagcgccggcgcgtggaggacgtgctggacaccgtgaaaatggatgtggagcccgaggtcaaggtgcgccccatcaagcaggtggcgccgggcctgggcgtgcagaccgtggacattcagatccccaccgacatggatgtcgacaaaaaaccctcgaccagcatcgaggtgcagaccgacccctggctcccagcctccactgctaccgtctccacttctaccgccgccacggctaccgagcctcccaggaggcgaagatggggcgccgccagccggctgatgcccaactacgtggtgcatccttccatcatcccgacgccgggctaccgcggcacccggtactacgccagccgccggcgcccagccagcaaacgccgccgccgcaccgccacccgccgccgtctggcccccgcccgcgtgcgccgcgtgaccacgcgccggggccgctcgctcgttctgcccaccgtgcgctaccaccccagcatcctttaattcgtgtgctgtgatactgttgcagagagatggctctcacttgccgcctgcgcatccccgtcccgaattaccgaggaagatcccgccgcaggagaggcatggcaggcagcggcctgaaccgccgccggcggcgggccatgcgcaggcgcctgagtggcggctttctgcccgcgctcatccccataatcgccgcggccatcggcacgatcccgggcatagcttccgttgcgctgcaggcgtcgcagcgccgttgatgtgcgaataaaagcctctttagactctgacacacctggtcctgtatatttttagaatggaagacatcaattttgcgtccctggctccgcggcacggcacgcggccgttcatgggcacctggaacgagatcggcaccagccagctgaacgggggcgccttcaattggagcagtgtctggagcgggcttaaaaatttcggctcgacgctccggacctatgggaacaaggcctggaatagtagcacggggcagttgctaagggaaaagctcaaagaccagaactttcagcagaaggtggtggacgggctggcctcgggcattaacggggtggtggacatcgcgaaccaggccgtgcagcgcgagataaacagccgcctggacccgcggccgcccacggtggtggagatggaagatgcaactcttccgccgcccaaaggcgagaagcggccgcggcccgacgcggaggagacgatcctgcaggtggacgagccgccctcgtacgaggaggccgtcaaggccggcatgcccaccacgcgcatcatcgcgccgctggccacgggtgtaatgaaacccgccacccttgacctgcctccaccacccgcgcccgctccaccgaaggcagctcccgcggtcgtgcaggcccccccggtggcgaccgccgtgcgccgcgtccccgcccgccgccaggcccagaactggcagagcacgttgcacagtatcgtaggcctgggagtgaaaagtctgaagcgccgccgatgctattgaaagagaggaaagaggacactaaagggagagcttaacttgtatgtgccttaccgccagagaacgcgcgaagatggccaccccctcgatgatgccgcagtgggcgtacatgcacatcgccgggcaggacgcctcggagtacctgagcccgggtctggtgcagtttgcccgcgccaccgacacgtacttcagcctgggcaacaagtttaggaaccccacggtggccccgacccacgatgtgaccacggaccggtcccagcgtctgacgctgcgcttcgtgcccgtggatcgcgaggacaccacgtactcgtacaaggcgcgcttcactctggccgtgggcgacaaccgggtgctagacatggccagcacttactttgacatccgcggcgtcctggaccgcggtcccagcttcaaaccctactcgggcacagcttacaacagtctggcccccaagggtgcccccaactccagccagtggcttgcaaaagacaccaatgctggcgatcaagcattaaaaacccacacacatggcgtagctgctatggggggaacagatatcacagcaaagggtttgcaaattggtgttgacacgactgaaaacaagaatgagcctatttatgcaaatgaaatataccagccagaacctcaggtaggagaggaaaacttgcaagatgttgaaaacttttatggaggcagagctcttaaaaaagaaaccaaaatgaaaccttgctatggctcgtttgccagacccacaaatgaaaaaggcggtcaagccaaatttttaactgacggcgatggtcagctaactaaaaatcatgatatcacaatgaatttctttgacactcctggaggaacagttggtcaggatactgaacttgaagcagacattgttatgtatgctgagaatgtgcatctggaaactccagacacgcatgtggtgtacaaaccaggaacttctgatgagagttcagaagcaaatttggttcagcagtccatgccaaacaggcccaactacatcggcttcagggacaactttgtgggtctcatgtactataacagcactggcaacatgggtgtgctggctggtcaagcatctcagttgaatgctgtggtcgacttgcaagacagaaacacagagctgtcttaccagctcttgctagattctctgggtgacagaaccagatactttagcatgtggaactctgcagtggacagttatgatcctgatgtcaggattattgaaaatcacggtgtggaagatgaacttccaaactattgcttcccattggatggagctggcactaatgctacctaccaaggtgtaaaagttaaaaatggccaagatggagatgtaaacgcagattgggaaaaagatccaaatcttgcttcacgaaaccaaatatgcaagggtaacatcttcgccatggagatcaacctccaggccaacctgtggaagagttttctgtactcgaatgtggccctgtacctgcccgactcatacaagtacacgccggccaacgtcacgctgcccgccaataccaacacctacgagtacatgaacggccgcgtggtagccccctcgctggtggacgcctacatcaacatcggcgcccggtggtcgctggaccccatggacaacgtcaacccattcaaccaccaccgcaacgcgggcctgcgttaccgctccatgcttctgggcaacggccgctacgtgcccttccacatccaagtgccccaaaagttctttgccatcaagaacctgctcctgctccccggctcctacacctacgagtggaacttccgcaaggatgtcaacatgatcctgcagagttccctcggaaacgacctgcgcgtcgacggcgcctccgtccgcttcgacagcgtcaacctctacgccacattcttccccatggcgcacaacaccgcctccaccctggaagccatgctgcgcaacgacaccaacgaccagtccttcaacgactacctctcggccgccaacatgctctaccccatcccggccaaggccaccaacgtgcccatctccatcccctcgcgcaactgggccgccttccgcggctggagtttcacccggctcaagaccaaagaaactccctccctcggctcgggtttcgatccctactttgtatactcgggttccatcccctacctcgacgggaccttctacctcaaccacaccttcaagaaggtctccatcatgttcgactcctcggtcagctggcccggcaacgaccggctgctcacgccgaacgagttcgagatcaagcgcagtgtcgacggggagggctacaatgtggcccaatgcaacatgaccaaggactggttcctcgtccagatgctctcccactacaacatcggctaccagggcttccacgtgcccgagggctacaaggaccgcatgtactccttcttccgcaacttccagcccatgagcaggcaggtggtcgatgagatcaactacaaggactacaaggccgtcaccctgcccttccagcacaacaactcgggcttcaccggctaccttgcacccaccatgcgtcaggggcagccctaccccgccaacttcccctatcctctcatcggccagacagccgtgccctctgtcacccagaaaaagttcctctgcgacagggtcatgtggcgcatccccttctccagcaacttcatgtccatgggcgccctcaccgacctgggtcagaacatgctctatgccaactcggcccacgcgctcgacatgaccttcgaggtggaccccatggatgagcccaccctcctctatcttctcttcgaagttttcgacgtggtcagagtgcaccagccgcaccgcggcgtcatcgaggccgtctacctgcgcacgcccttctccgccggcaacgccaccacctaagcatgagcggctccagcgaacgagagctcgcggccatcgtgcgcgacctgggctgcgggccctactttttgggcacccacgacaagcgcttcccgggcttcctcgccggcgacaagctggcctgcgccattgtcaacacggccggccgcgagaccggaggcgtgcactggctcgccttcggctggaacccgcgctcgcgcacctgctacatgttcgacccatttgggttctcggaccgccggctcaagcagatttacagcttcgagtacgaggctatgttgcgccgaagcgccctggcttcctcgcccgaccgctgtctcagcctcgagcagtccacccagaccgtgcaggggcccgactccgccgcctgcggacttttctgttgcatgttcttgcatgccttcgtgcactggcccgaccgacccatggacgggaaccccaccatgaacttgctgacgggggtgcccaacggcatgctacaatcgccacaggtgctgcccaccctccggcgcaaccaggaggagctctaccgcttcctcgcgcgccactccccttactttcgctcccaccgcgccgccatcgaacacgccaccgcttttgacaaaatgaaacaactgcgtgtatctcaataaacagcacttttattttacatgtactggagtatatgcaagttatttaaaagtcgaaggggttctcgcgctcgtcgttgtgcgccgcgctggggagggccacgttgcggtactggaacttgggctgccacttgaactcggggatcaccagtttgggcactggggtctcggggaaggtctcgctccacatgcgccggctcatctgcagggcgcccagtatgtccggggcggagatcttgaaatcgcagttggggccggtgctctgcgcgcgcgagttgcggtacacggggttgcagcactggaacaccatcagactggggtacttcacactggccagcacgctcttgtcgctgatctgatccttgtccaggtcctcggcgttgctcaggccgaacggggtcatcttgcacagctggcggcccaggaagggcacgctctgaggcttgtggttacactcgcagtgcacgggcatcagcatcatccccgcgccgcgctgcatattcgggtagagggccttgacaaaggccgagatctgcttgaaagcttgctgggccttggccccctcgctgaaaaacaggccgcagctcttcccgctgaactggttattcccgcacccggcatcatgcacgcagcagcgcgcgtcatggctggtcagttgcaccacgctccgtccccagcggttctgggtcaccttggccttgctaggctgctccttcaacgcgcgctggccgttctcgctggtcacatccatctccaccacgtggtccttgtggatcatcaccgtcccgtgcaaacacttgagctggccttccacctcggtgcagccgtgatcccacagggcgcagccggtgcactcccaattcttgtgtgcgatcccgctgtggctgaagatgtaaccttgcaacaggcgacccatgacggtgctaaatgatttactggtgctgaaggtcagttgcagaccgcgggcctcctcgttcatccaggtctggcacatcttttggaagatctcggtctgctcgggcatgagcttgtaagcatcgcgcaggccgctgtcgacgcggtagcgttccataagcacgttcatggtatccatgcccttctcccaggacgagaccagaggcagactcagggggttgcgcacgttcagaataccgggggtcgcgggctcgacgatgcgttttccgtccttgccttccttcaacagaaccggcggctggctgaatcccactcccacgatcacggcatcttcctggggcatctcttcgtcggggtctaccttggtcacatgcttggtctttctggcttgcttcttttttggagggctgtccacggggaccacgtcctcctcggaagacccggagcccacccgctgatactttcggcgcttggtgggcagaggaggtggaggcgaggggctcctctcctgctccggcggatagcgcgccgacccgtggccccggggcggagtggcctctcgctccatgaaccggcgcacgtcctgactgccgccggccattgtttcctaggggaagatggaggagcagccgcgtaagcaggagcaggaggaggacttaaccacccacgagcaacccaaaatcgagcaggacctgggcttcgaagagccggctcgtctagaacccccacaggatgaacaggagcacgagcaagacgcaggccaggaggagaccgacgctgggctcgagcatggctacctgggaggagaggaggatgtgctgctgaaacacttgcagcgccagtccctcatcctccgggacgccctggccgaccggagcgaaacccccctcagcgtcgaggagctgtgtcgggcctacgagctcaacctcttctcgccgcgcgtgccccccaaacgccagcccaacggcacctgcgagcccaacccgcgtctcaacttctatcccgttttcgcggtccccgaggcccttgccacctatcacatttttttcaagaaccaaaagatccccgtctcctgccgcgccaaccgcacccgcgccgacgcgctcctcgctctggggcccggcgcgcgcatacctgatatcgcttccctggaagaggtgcccaagatcttcgaagggctcggtcgggacgagacgcgcgcggcgaacgctctgaaagaaacagcagaggaagagggtcacactagcgccctggtagagttggaaggcgacaacgccaggctggccgtgctcaagcgcagcgtcgagctcacccactttgcctaccccgccgtcaacctcccgcccaaggtcatgcgtcacatcatggatcagctcatcatgccccacatcgaagccctcgatgaaagtcaggagcagcgccccgaggacgcccgacccgtggtcagcgacgagatgctcgcgcgctggctcgggacccgcgagccccaggctttggaacagcggcgcaagctcatgctggccgtggtcctggtcaccctcgagctcgaatgcatgcgccgcttcttcagcgaccccgagaccctgcgcaaagtcgaggagaccctgcactacactttcagacacggtttcgtcaggcaggcctgcaagatttccaacgtggagctgaccaacctggtctcctgcctggggatcctgcatgagaaccgcctgggacagaccgtactccactctaccctgaagggcgaggcgcggagggactatgtccgcgactgcgtctttctctttctctgccacacatggcaagcagccatgggcgtgtggcagcagtgtctcgaggacgagaacctgaaggagctggacaagcttcttgctagaaaccttaaaaagctttggacgggcttcgacgagcgcaccgtcgcctcggacctggccgagatcgtcttccccgagcgcctgaggcagacgctgaaaggcgggctgcccgacttcatgagccagagcatgttgcaaaactaccgcactttcattctcgagcgatcggggatgctgcccgccacctgcaacgctttcccctccgactttgtcccgctgagctaccgcgagtgtcccccgccgctgtggagccactgctacctcttgcagctggccaactacatcgcctaccactcggacgtgatcgaggacgtgagcggcgaggggctgctcgagtgccactgccgctgcaacctgtgctccccgcaccgctccctggtctgcaacccccagctccttagcgagacccaggtcatcggtaccttcgagctgcaaggtccgcaggagtccaccgctccgctgaaactcacgccggggttgtggacttccgcgtacctgcgcaaatttgtacccgaggactaccacgcccatgagataaagttcttcgaggaccaatcgcggccgcagcacgcggatctcacggcctgcgtcatcacccagggcgcgatcctcgcccaattgcacgccatccaaaaatcccgccaagagtttcttctgaaaaagggtagaggggtctacctggacccccagacgggcgaggtgctcaacacgggtctcccccagcatgccgaggaagaagcaggagccgctagtggaggagatggaagaagaatgggacagccaggcagaggaggacgaatgggaggaggagacagaggaggaagaattggaagaggtggaagaggagcaggcaacagagcagcccgtcgccgcaccatccgcgccggcagccccggcggtcacggatacaacctccgcagctccggccaagcctcctcgtagatgggatcgagtgaagggcgacggtaagcacgagcggcagggctaccgatcatggagggcccacaaagccgcgatcatcgcctgcttgcaagactgcggggggaacatcgctttcgcccgccgctacctgctcttccaccgcggggtgaacatcccccgcaacgtgttgcattactaccgtcaccttcacagctaagaaaaagcaagtaagagaagtcgccggaggaggcctgaggatcgcggcgaacgagcccttgaccaccagggagctgaggaaccggatcttccccactctttatgccatttttcagcagagtcgaggtcagcagcaagagctcaaagtaaaaaaccggtctctgcgctcgctcacccgcagttgcttgtaccacaaaaacgaagatcagctgcagcgcactctcgaagacgccgaggctctgttccacaagtactgcgcgctcactcttaaagactaaggcgcgcccacccggaaaaaaggcgggaattacctcatcgccaccatgagcaaggagattcccaccccttacatgtggagctatcagccccagatgggcctggccgcgggcgcctcccaagactactccacacgcatgaactggctcagtgccggcccctcgatgatatcacgggtcaacggggtccgcagtcatcgaaaccagatattgttggagcaggcggcggtcacctccacgcccagggcaaagctcaacccgcgtaattggccctccaccctggtgtatcaggaaatccccgggccgactaccgtactacttccgcgtgacgcactggccgaagtccgcatgactaactcaggtgtccagctggccggcggcgcttcccggtgcccgctccgcccacaatcgggtataaaaaccctggtgatccgaggcagaggcacacagctcaacgacgagttggtgagctcttcgatcggtctgcgaccggacggagtgttccaactagccggagccgggagatcgtccttcactcccaaccaggcctacctgaccttgcagagcagctcttcggagcctcgctcgggaggcatcggaaccctccagttcgtggaggagtttgtgccctcggtctacttcaaccccttctcgggatcgccaggcctctacccggacgagttcataccgaacttcgacgcagtgagagaagcggtggacggctacgactgaatgtcccatggtgactctgctgagctcgctcggttgaggcatctggaccactgccgccgcctgcgctgcttcgcccgggagagctgcggactcatctactttgagtttcccgaggagcaccccaacggtcctgcacacggagtgcggatcaccgtagagggcaccaccgagtctcacctggtcaggttcttcacccagcaacccttcctggtcgagcgggaccggggcgccaccacctacaccgtctactgcatctgtccgaccccgaagttgcatgagaatttttgctgtactctttgtggtgagtttaataaaagctaaactcttgcaatactctggaccttgtcgtcatcaactcaacgagaccgtctacctcaccaaccagactgaggtaaaactcacctgcagaccacacaagacctatatcatctggttcttcgagaacacctcatttgcagtctcaaacactcactgcaacgacggtgttgaacttccaaacaacctttccagtggactgagttacgatacacatagagctaagctcgtcctctacaatcctttcgtagagggaacctaccactgccagagcggaccttgcttccacagttttactttggtgaacgttaccggcagcagcacagccgctccagaacctaaccttccttctgatactatcaaacctcgtttcggaggtgagctaaggcttcccccttctgaggagggggttagcccatacgaagtggtcgggtatttgattttaggggtggtcctgggtgggtgcatagcggtgctagctcagctgccttgctgggtagaaatcaaaatctttatatgctgggtcagacattgtggggaggaactatgaaggggctcttgctgattatcctttccctggtggggggtgtgctgtcatgccacgaacagccacgatgtaacatcaccacaggcaatgagaggagtgtcatatgcacagtagtcatcaaatgcgagcatgaatgccctctcaacatcacattcaaaaaccgtaccatggggaatgcatgggtgggcgactgggaaccaggagatgagcagaactacacggtcactgtccatggtagcgatggaaatcacactttcggtttcaaattcatttttgaagtcatgtgtgatatcacactgcatgtggctagacttcatggcttgtggccccctaccaaggaaaacatggttgggttttctttggcttttgtgatcatggcctgctttatgtcaggtctgctggtaggagctctagtgtggttcctgaaacgcaagcccaggtatggaaatgaggagaaggaaaaattgctataaattctttttcttttcacagcaccatgaatactttgaccagtgtcgtgctgctctctcttcttgtagcttttagtcaggcaggaattattaacttaaatgtatcatggggaatgaatctaactttagtgggaccctcagacctgccagttacatggtatgatggaaagggaatgcagttttgtgatggaaatacaattaagaacccacaaatcaagcatagctgtaatcaacagaatctaactttacttaatgctgacaagtctcatgaaagaacttacctaggttacagacatgacagtaagggaaaagtagactataaggttacagtcataccacctcctccagccactcgcaagcctttgtcagagcctcattatgttactgtgactatgggcgataacataactttagtgggaccctcagacctgccagttacatggtatgatggagaaggaaataaattctgcgatggagaaaaagttgaacatgcagaatttaatcatacatgtaacatccagaacctgacactgctctttgtcaacttaacgcataatggagcatacattggttataacaaagacggttctgatagagaattatatgaggtgtcagtcaaaaccttgtttcagaacggggctggacaaagtaaggttgaacaaggtaataaagggaaacctaatactgctcaaagtggtggtaaaaaaaccaaaacagaacatagaaaccagagtccaaaaagaaaatcaacaaataaccttcagccaacacaattgtatgttaggccttttactaatgttagtttaactggacctccaaatggcaaggttacttggtatgatggcgaacttaatgatccatgtgaacaaaagtacaaactcagaactttttgcaatcagcaaaatctaactttaattaatgtaagcagcacttatgatggcatctattatggcactgatgaaaaagataaggcaaatcgttacagaataaaagtaaatactacaaatcacaaaactgttaaaattaagccacataccagagaacctcctgctgtacaagaaaaacagtttgaattacaagatgcagaaactgatgaaaacgaatcaaaaattccctcagctactgtggcaatcgtggtgggagtgattgcgggctttgtaactctgatcattgtcttcatatgctacatctgctgccgcaagcgtcccaggtcatacaatcatatggtagacccactactcagcttctcttactgaaactcagtcactctcatttcagaaccatgaaggctttcacagcttgcgttctgattagcatagtcacacttagttcagctgcaatgattaatgttaatgtcactagaggtggtaaaattacattgaatgggacttatccacaaactacatggacaagatatcataaagatggatggaaaaatatctgtgaatggaatgttactgcatataaatgcttcaataatggaagcattactattactgccactgccaacattacttctggcacatacaaagctgaaagctataaaaatgaaatcaaaaaactaacctataaaaacaacaaaaccacatttgaagattctggaaattatgaacatcaaaaattatctttttatatgttgacaataattgaactgcctacaactaaggctcccaccacaaccagtacaactattaagaccactactcacactacagtgcaaaatactactttattgattgggtttttactgagagagaatgaaagtactactgaacagacagaggctacctcaagtgccttcagcagcactgcaaatttaacttcgcttgcttggactaatgaaaccggagtatcattgatgcatggccagccttactcaggtttggatattcaaattacttttctggttgtctgtgggatctttattcttgtggttcttctgtactttgtctgctgcaaagccagagagaaatctaggaggcccatctacaggccagtgattggggaacctcagccactccaagtggatggaggcttaaggaatcttctcttctcttttacagtatggtgatcagccatgattcctaggttcttcctatttaacatcctcttttgtctcttcaacatctgtgctgccttcgcggccgtctcgcacgcctcgcccgactgtctagggcctttccccacctacctcctctttgccctgctcacctgcacctgcgtctgcagcattgtctgcgtggtcatcaccttcctgcagctcatcgactggtgctgcgcgcgctataattatctccaccacagtcccgaatacagggacgagaacgtagccagaatcttaaggctcatctgaccatgcagactctgctcatgctgctatccctcctatcccctgccctcgccacttctgctgactctaaatgcaaattcgcggagatatggaatttcttagattgctatcaggagaaaattgatatgccctcctattacttggtgattgtgggaatagtcatggtctgctcctgcactttctttgccatcatgatctacccctgttttgatctcggctggaactctgttgaggcattcacatacacactagaaagcagttcactagcctccacgccaccgcccacaccgcctccccgcagaaatcagttcccactgattcagtacttagaagagccccctccccggcccccttccactgttagctactttcacataaccggcggcgatgactgaccaccacctggacctcgagatggacggccaggcctccgagcagcgcatcctgcaactgcgcgtccgtcagcagcaggagcgggccgccaaggagctcctcgatgccatcaacatccaccagtgcaagaagggcatcttctgccttgtcaaacaggcaaagatcacctacgagctcgtgtccggcggcaagcagcatcgcctcacctatgagctgccccagcagaagcagaagttcacctgcatggtgggcgtcaaccccatagtcatcacccagcagtcgggcgagaccaacggctgcatccactgctcctgcgaaagccccgagtgcatatactccctcctcaagaccctttgcggactccgcgacctcctccccatgaactgatgttgattaaaagcacgaaaaccaatcagacccttcccccatttccccattcccaattactcataaaataaatcattggaattaatcattcaataaaaatcacttacttgaaatctgaaagtatgtctctggtgtagttgttcagcagcacctcgttaccctcctcccagctctggtattccagtccccggcgggcggcgaacttcctccacaccttgaaagggatgtcaaattcctggtccacaattttcattgtcttccctctcagatgtcaaagaggctccgggtggaagatgacttcaaccccgtctacccctatggctacgcgcggaatcagaatatccccttcctcactcccccctttgtctcctccgatggattccaaaacttcccccctggggtcctgtcactcaaactggctgacccaatagccatcgtcaatgggaatgtctcactcaaagtgggagggggtctcactttgcaagatggaactggaaaactaacagtcaatgctgatccacctttgcaacttacaaacaacaaattagggattgctttggacgctccatttgatgttatagacaataaactcacattgttagcgggccatggcttgtctattataacaaaagaaacatcaacactgcctggcttgattaatactcttgtagtattaactggaaagggtattggaacagaatcaacagataatggcggaagcgtatgtgttagagttggagaaggtggcggcttatcatttaataatgatggagacttggtagcatttaataaaaaagaagataagcgcaccctatggacaactccagacacatctccaaattgcaagattgatcaagataaggactctaagttaactctggtccttacaaagtgtggaagtcaaatattggctaatgtgtcattaattgtcgtagctggtaagtacaaaattatcaataacaatactcaaccagctctcaaaggatttaccattaaattattgtttgatgaaaatggagtacttatggaatcttcaaatcttggtaaatcatattggaactttagaaatgaaaattcaattatgtcaacagcttatgaaaaagctattggattcatgcctaatttggtagcctatccaaaacctaccgctggctctaaaaaatatgcaagagatatagtttatggaaacatctaccttggtggaaagccagatcaaccagtaaccattaaaactacctttaatcaggaaactggatgtgaatattctatcacatttgattttagttgggccaagacttatgtaaatgttgaatttgaaacaacctcttttaccttttcctatatcgcccaagaatgaaagaccaataaacgtgtttttcatttcaaaattttcatgtatctttattgatttttacaccagcacgggtagtcagtctcccaccaccagcccatttcacagtgtacactgttctctcagcacgggtggccttaaatagggaaatgttctcattagtgcgggaactggacttggggtctataatccacacagtttcctggcgagccaaacgggggtcggtgattgagatgaagccgtcctctgaaaagtcatccaagcgagcctcacagtccaaggtcacagtctggtggaatgagaagaacgcacagattcatactcggaaaacaggatgggtctgtgcctctccatcagcgccctcagcagtctctgccgccggggctcggtgcggctgctgcagattggatcgggatcgcaagtctctctgactataatccccacagccttcagcatcagtctcctggtgcgtcgggcacagcaccgcatcctgatctctgccatgttctcacagtaagtgcagcacataatcaccatgttattcagcagcccataattcagggcgctccagccaaagctcatgttggggatgatggaacccacgtgaccatcgtaccagatgcggcagtatatcaggtgcctgcccctcataaacacactgcccatatacatgatctctttgggcatgtttctgttcacaatctgacggtaccaggggaagcgctggttgaacatgcacccgtaaatgactctcctgaaccacacggccagcagggtgcctcccgcccgacactgcagggagcccggggatgaacagtggcaatgcaggatccagcgctcgtacccgctcaccatctgagctctcaccaagtccagggtagcagggcacaggcacactgacatacatctttttaaaatttttatttcctctggggtcaggatcatatcccaggggactggaaactcttggagcagggtaaagccagcagcacatggtaatccacggacagaacttacattatgataatctgcatgatcacaatcgggcaacaggggatgttgttcagtcagtgaagccctggtttcctcatcagatcgtggtaaacgggccctgcgatatggatgatggcggagcgagctggattgaatctcggtttgcattgtagtggattctcttgcgtaccttgtcgtacttctgccagcagaaatgggcccttgaacagcagatacccctcctgcggccgtcctttcgctgctgccgctcagtcatccaactgaagtacatccattctcgaagattctggagaagttcctctgcatctgatgaaataaaaaacccgtccatgcgaattcccctcatcacatcagccaggactctgtaggccatccccatccagttaatgctgccttgtctatcattcagagggggcggtggcaggattggaagaaccatttttattccaaacggtctcgaaggacgataaagtgcaagtcacgcaggtgacagcgttcccctccgctgtgctggtggaaacagacagccaggtcaaaacccactctattttcaaggtgctcgaccgtggcttcgagcagtggctctacgcgtacatccagcataagaatcacattaaaggctggccctccatcgatttcatcaatcatcaggttacattcctgcaccatccccaggtaattctcatttttccagccttgaattatctctacaaattgttggtgtaagtccactccgcacatgtggaaaagctcccacagtgccccctccactttcataatcaggcagaccttcataatagaaacagatcctgctgctccaccacctgcagcgtgttcaaaacaacaagattcaataaggttctgccctccgccctgagctcgcgcctcaatgtcagctgcaaaaagtcacttaagtcctgggccactacagctgacaattcagagccagggctaagcgtgggactggcaagcgtaagggaaaactttaatgctccaaagctagcacccaaaaactgcatgctggaataagctctctttgtgtctccggtgatgccttccaaaatgtgagtgataaagcgtggtagtttttctttaatcatttgcgtaatagaaaagtcctctaaataagtcactaggaccccagggaccacaatgtggtagcttacaccgcgtcgctgaagcatggttagtagagatgagagtctgaaaaacagaaagcatgcactaaactaaggtggctatttttactgaaggaaaaatcactctctccagcaacagggtacccactgggtggcccttgcggacatacaaaaatcggtccgtgtgattaaaaagcagcacagtaagttcctgtcttcttccggcaaaaatcacatcggactgggttagtatgtccctggcatggtagtcattcaaggccataaatctgccctgatatccagtaggaaccagcacactcacttttaggtgaagcaataccaccccatgcggaggaatgtggaaagattcagggcaaaagaaggtatatctattgctagtcccttcctggacgggagcgatccctccaggactatctatgaaagcatacagagattcagccatagctcagcccgcttaccagtagacagagagcacagcagtacaagcgccaacagcagcgactgactacccactaacccagctccctatttaaaggcaccttacactgacgtaatgaccaaaggtctaaaaaccccgccaaaaaaacacacacgccctgggtgttttttcgcgaaaacacttccgcgttctcacttcctcgtatcgatttcgtgactcaacttccgggttcccacgttacgtcacttctgcccttacatgtaactcagtcgtagggcgccatgttgcccacgtccaaaatggtttccatgtccagccacgcctccgcggcgaccgttaacgccgtgcgtcgtgacgtcatttgcatcgtcttctctcgtccaatcagcgttggctccgccccgaaaccgttaaaattcaaaagctcatttgcatattaacttttgtttactttgtggggtatattatatagataggccaagctatttaggtgacactatagaatactcaagctatgcatcaagcttggtaccgagctcggatccactagtaacggccgccagtgtgctggaattcgcccttgtttaaacgcgatcg

SEQ ID NO: 20 - DNA, 35085 bp, Adenovirus D10
  MISC_FEATURE (1)..(35085): Complete Genome
catcatcaataatataccccacaaagtaaacaaaagttaatatgcaaatgaggttttaaatttagggcggggctactgctgattggccgagaaacgttgatgcaaatgacgtcacgacgcacggcgttaacggtcgccgcggaggcgtggcctagcccggaagcaagtcgcggggctgatgacgtataaaaaagcggactttagacccggaaacggccgattttcccgcggccacgcccggatatgaggtaattctgggcggatgcaagtgaaattaggtcattttggcgcgaaaactgaatgaggaagtgaaaagcgaaaaataccggtccctcccagggcggaatatttaccgagggccgagagactttgaccgattacgtgggggtttcgattgcggtgtttttttcgcgaatttccgcgtccgtgtcaaagtccggtgtttatgtcacagatcagctgatccgcagggtatttaaaccagtcgagtccgtcaagaggccactcttgagtgccagcgagtagagatttctctgagctccgctcccagagaccgagaaaaatgagacacctgcgcctcctgccttcaactgtgcccggtgagctggctgtgcttatgctggaggactttgtggatacagtattggaggacgaactgcatccaagtccgttcgagctgggacccacacttcaggatctctatgatctggaggtagatgcccatgatgacgaccctaacgaggaggctgtgaatttaatatttccagaatctatgattcttcaggctgacatagccaacgaatctactccacttcatacaccgactctgtcacccatacctgaattggaagaggaggacgaactagacctccggtgttatgaggaaggttttcctcccagcgattcagaggatgaacggggtgagcagaccatggctctgatctcagactatgcttgtgtgattgtggaggaacaagtagtgattgaaaattctaccgagccagtggagggctgtagaaaatgccagtaccaccgggataagtctggagacccgaacgcatcatgcgctttgtgctatatgaaacagactttcagctttatttacagtaagtggagtgaatgtgagagaggctgagtgcttaacacatcactgtgtattgcttgaacagctgtgctaagtgtggtttatttttgtttctaggtccggtgtcagaggatgagtcatcaccctcagaagaagaccacccgtctccccctgatctcacagatgacacgcccctgcaagtgcacagacccaccccagtcagagccagtggcgagaggcgagcagctgttgaaaaaattgaggacttgttacatgacatgggtggggatgaacctttggacctgagcttgaaacgccccaggaactaggcgcagctgcgcttagtcatgtgtaaataaagttgtacaataaaagtatatgtgacgcatgcaaggtgtggtttatgactcatgggcggggcttagtcctatataagtggcaacacctgggcactgggcacagaccttcagggagttcctgatggatgtgtggactatccttgcagactttagcaagacacgccggcttgtagaggatagttcagacgggtgctccgggttctggagacactggtttggaactcctctatctcgcctggtgtacacagttaagaaggattataaagaggaatttgaaaatatttttgctgactgctctggcctgctagattctctgaatcttggccaccagtcccttttccaggaaagggtactccacagccttgatttttccagcccagggcgcactacagccggggttgcttttgtggtttttctggttgacaaatggagccaggacacccaactgagcaggggctacatcctggacttcgcagccatgcacctgtggagggcctggatcaggcagcggggacagagaatcttgaattactggcttctacagccagcagctccgggtcttcttcgtctacacagacaaacatccatgttggaggaagaaatgaggcaggccatggacgagaacccgaggagcggcctggaccctccgtcggaagaggagctggattgaatcaggtatccagcctgtacccagagcttagcaaggtgctgacatccatggccaggggagttaagagggagaggagcgatgggggtaataccgggatgatgaccgagctgacggccagcctgatgaatcggaagcgcccagagcgccttacctggtacgagctacagcaggagtgcagggatgagttgggcctgatgcaggataaatatggcctggagcagataaaaacccattggttgaacccagatgaggattgggaggaggctattaagaagtatgccaagatagccctgcgcccagattgcaagtacatagtgaccaagaccgtgaatatcagacatgcctgctacatctcggggaacggggcagaggtggtcatcgataccctggacaaggccgccttcaggtgttgcatgatgggaatgagagcaggagtgatgaatatgaattccatgatcttcatgaacatgaagttcaatggagagaagtttaatggggtgctgttcatggccaacagccacatgaccctgcatggctgcagtttcttcggcttcaacaatatgtgcgcagaggtctggggcgcttccaagatcaggggatgtaagttttatggctgctggatgggcgtggtcggaagacccaagagcgagatgtctgtgaagcagtgtgtgtttgagaaatgctacctgggagtctctaccgagggcaatgctagagtgagacactgctcttccctggagacgggctgcttctgcctggtgaagggcacagcctctctgaagcataatatggtgaagggctgcacggatgagcgcatgtacaacatgctgacctgcgattcgggggtctgccatatcctgaagaacatccatgtgacctcccaccccagaaagaagtggccagtgtttgagaataacctgctgatcaagtgccatatgcacctgggagccagaaggggcaccttccagccgtaccagtgcaactttagccagaccaagctgctgttggagaacgatgccttctccagggtgaacctgaacggcatctttgacatggatgtctcggtgtacaagatcctgagatacgatgagaccaagtccagggtgcgcgcttgcgagtgcgggggcagacacaccaggatgcagccagtggccctggatgtgaccgaggagctgagaccagaccacctggtgatggcctgtaccgggaccgagttcagctccagtggggaggacacagattagaggtaggtcgagtgagtagtgggcgtggctaaggtgactataaaggcgggtgtcttacgagggtctttttgcttttctgcagacatcatgaacgggaccggcggggccttcgaaggggggctttttagcccttatttgacaacccgcctgccgggatgggccggagttcgtcagaatgtgatgggatcgacggtggatgggcgcccagtgcttccagcaaattcctcgaccatgacctacgcgaccgtggggagctcgtcgctcgacagcaccgccgcagccgcggcagccgcagctgccatgacagcgacgagactggcctcgagctacatgcccagcagcggcagcagcccctctgtgcccagttccatcatcgccgaggagaaactgctggccctgctggccgagctggaagccctgagccgccagctggccgccctgacccagcaggtgtccgagctccgcgagcagcaacagcagcaaaataaatgattcaataaacacagattctgattcaaacagcaaagcatctttattatttattttttcgcgcgcggtaggccctggtccacctctcccgatcattgagagtgcggtggattttttccaggacccggtagaggtgggattggatgttgaggtacatgggcatgagcccgtcccgggggtggaggtagcaccactgcatggcctcgtgctctggggtcgtgttgtagatgatccagtcatagcaggggcgctgggcgtggtgctggatgatgtctttgagaaggagactgatggccacggggagccccttggtgtaggtattggcgaagcggttgagctgggagggatgcatgcggggggagatgatgtgcagtttggcctggatcttgaggttggcgatgttgccacccagatcccgccgggggttcatgttgtgcaggaccaccaggacggtgtagcccgtgcacttggggaacttgtcatgcaacttggaagggaatgcgtggaagaatttggagacgcccttgtgcccgcccaggttttccatgcattcatccatgatgatggcgatgggcccgtgggctgcggctttggcaaagacgtttctggggtcagatacatcataattatgctcctgggtgagatcatcataagacattttaatgaatttggggcggagggtgccagattgggggacgatggttccctcgggccccggggcgaagttcccctcacagatctgcatctcccaggctttcatctcggagggggggatcatgtccacctgcggggcgatgaaaaaaacggtttccggggctggggtgatgagctgcgaagagagcaggtttctcaacagctgggacttgccgcacccggtcgggccgtagatgaccccgatgacgggttgcaggtggtagttcaaggacatgcagctgccgtcgtcccggaggaggggggccacctcgttgagcatgtctctgacttggaggttttcccgaacgagctcgccgaggaggcggtccccgcccagcgagaggagctcttgcagggaagcaaagtttttcaggggcttgagtccgtcggccatgggcatcttggcgagggtctgcgagaggagctccaggcggtcccagagctcggtgacgtgctctacggcatctcgatccagcagacttcctcgtttcgggggttgggacgactgcgactgtagggcacgagacgatgggcgtccagcgcggccagcgtcatgtccttccagggtctcagggtccgagtgagggtggtctccgtcacggtgaaggggtgggcccctggctgggcgcttgcaagggtgcgcttgagactcatcctgctggtgctgaaacgggcacggtcttcgccctgcgagtcggcgagatagcagttgaccatgagctcgtagttgagggcctcggcggcgtggcccttggcgcggagcttgcccttggaagagcgcccgcaggcgggacagaggagggattgcagggcgtagagcttgggggcgagaaagacggactcgggagcgaaagcgtccgctccgcagtgggcgcagacggtctcgcactcgacgagccaggtgagctctggctgctcggggtcaaaaaccagttttcccccgttctttttgatgcgcttcttacctcgcgtctccatgagtctgtgtccgcgctcggtgacaaacaggctgtcggtgtccccgtagacggacttgattggcctgtcctgcaggggcgtcccgcggtcctcctcgtagagaaactcggaccactctgagacaaaggcgcgcgtccacgccaagacaaaggaggccacgtgcgaggggtagcggtcgttgtccaccagggggtccaccttttccaccgtgtgcagacacatgtccccctcctccgcatccaagaaggtgattggcttgtaggtgtaggccacgtgaccgggggtccccgacgggggggtataaaagggggcgggtctgtgctcgtcctcactctcttccgcgtcgctgtccacgagcgccagctgttggggtaggtattccctctcgagagcgggcatgacctcggcactcaggttgtcagtttctagaaacgaggaggatttgatgttggcctgccctgccgcgatgctttttaggagactttcatccatctggtcagaaaagacaatttttttattgtcaagcttggtggcgaaggagccatagagggcgttggagagaagcttggcgatggatctcattgtctgatttttgtcacggtcggcgcgctccttggccgcgatgttgagctggacatactcgcgcgcgacgcacttccattccgggaagacggtggtgcgctcgtcgggcacgatcctgacgcgccagccgcggttatgcagggtgaccaggtccacgctggtggccacctcgccgcgcaggggctcgttggtccagcagagtctgccgcccttgcgcgagcagaacggtggcagcacatcaagcagatgctcgtcaggggggtccgcatcgatggtgaagatgcccggacagagttccttgtcaaaataatctatttttgaggatgcatcatccaaggccatctgccactcgcgggcggccagcgctcgctcgtaggggttaaggggcggaccccagggcatgggatgcgtgagggcggaggcgtacatgccgcagatgtcatagacatagatgggctccgagaggatgccgatgtaggtgggataacagcgccccccgcggatgctggcgcgcacgtagtcatacaactcatgcgagggggccaagaaggcggggccgagattggtgcgctggggctgctcggcgcggaagacgatctggcgaaagatggcatgcgagttggaggagatggtgggccgttggaagatgttaaagtgggcgtggggcaagcggaccgagtcgcggatgaagtgcgcgtaggagtcttgcagcttggcgacgagctcggcggtgacgaggacgtccatggcgcagtagtccagcgtttcgcggatgatgtcataacccgcttctcctttcttctcccacagctcgcggttgagggcgtactcctcgtcatccttccagtactcccggagcgggaatcctcgatcgtccgcacggtaagagcccagcatgtagaaatggttcacggccttgtagggacagcagcccttctccacggggagggcgtaagcttgtgcggccttgcggagcgaggtgtgcgtcagggcgaaggtgtccctgaccatgactttcaagaactggtacttgaaatccgagtcgtcgcagccgccgtgctcccagagctcgaaatcggtgcgcttcttcgagagggggttaggcagagcgaaagtgacgtcattgaagagaatcttgcctgctcgcggcatgaaattgcgggtgatgcggaaagggcccgggacggaggctcggttgttgatcacctgggcggcaaggacgatctcgtcgaagccgttgatgttgtgcccgacgatgtagagttccatgaatcgcgggcggcctttgatgtgcggcagctttttgagctcctcgtaggtgaggtcctcggggcattgcaggccgtgctgctcgagcgcccactcctggagatgtgggttggcttgcatgaaggaagcccagagctcgcgggccatgagggtctggagctcgtcgcgaaagaggcggaactgctggcccacggccatcttttctggggtgacgcagtagaaggtgagggggtcccgctcccagcgatcccagcgtaagcgcacggcgagatcgcgagcgagggcgaccagctcgggttcccccgagaatttcatgaccagcatgaaggggacgagctgcttgccgaaggaccccatccaggtgtaggtttctacatcgtaggtgacaaagagccgctccgtgcgaggatgagagccgattgggaagaactggatttcctgccaccagttggacgagtggctgttgatgtgatgaaagtagaaatcccgccggcgaaccgagcactcgtgctgatgcttgtaaaagcgtccgcagtactcgcagcgctgcacgggctgtacctcatccacgagatacacagcgcgtcccttgaggaggaacttcaggagtggcggccctggctggtggctttcatgttcgcctgcgtgggactcaccctggggctcctcgaggacggagaggctgacgagcccgcgcgggagccaggtccagatctcggcgcggcgggggcggagagcgaagacgagggcgcgcagttgggagctgtccatggtgtcgcggagatccaggtccgggggcagggttctgaggttgacctcgtagaggcgggtgagggcgtgcttgagatgcagatggtacttgatctccacgggtgagttggtggtcgtgtccacgcattgcatgagcccgtagctgcgcggggccacgaccgtgccgcggtgcgcttttagaagcggtgtcgcggacgcgctcccggcggcagcggcggttccggccccgcgggcaggggcggcagaggcacgtcggcgtggcgctcgggcaggtcccggtgctgcgccctgagagcgctggcgtgcgcgacgacgcggcggttgacatcctggatctgccgcctctgcgtgaagaccacgggccccgtgactttgaacctgaaagacagttcaacagaatcaatctctgcgtcattgacggcggcctgacgcaggatctcttgcacgtcgcccgagttgtcctggtaggcgatctcggacatgaactgttcgatctcctcctcctggagatcgccgcggcccgcgcgctccacggtggcggcgaggtcattggagatgcggcccatgagctgcgagaaggcgcccaggccgctctcgttccagacgcggctgtagaccacgtccccgtcggcgtcgcgtgcgcgcatgaccacctgcgcgaggttgagctccacgtgccgcgtgaagacggcgtagttgcgcaggcgctggaagaggtagttgagggtggtggcgatgtgctcggtgacgaagaagtacatgatccagcggcgcaggggcatctcgctgatgtcgccgatggcctccagcctttccatggcctcgtagaaatccacggcgaagttgaaaaactgggcattgcgggccgagaccgtgagctcgtcttccaggagcctgatgagctcggcgatggtggcgcgcacctcgcgctcgaaatccccgggggcctcctcttcttcctcttcttccatgacgacctcttcttctatttcttcctctgggggcggtggtggtggcggggcccgacgacgacggcgacgcaccgggagacggtcgacgaagcgctcgatcatctccccgcggcggcgacgcatggtttcggtgacggcgcgaccccgttcgcgaggacgcagcgtgaagacgccgccggtcatctcccggtaatggggcgggtccccgttgggcagcgatagggcgctgacgatgcatcttatcaattgcggtgtaggggacgtgagcgcgtcgagatcgaccggatcggagaatctttcgaggaaagcgtctagccaatcgcagtcgcaaggtaagctcaaacacgtagcagccctgtggacgctgttagaattgcggttgctgatgatgtaattgaagtaggcgtttttgaggcggcggatggtggcgaggaggaccaggtccttgggtcccgcttgctggatgcggagccgctcggccatgccccaggcctggccctgacaccggctcaggttcttgtagtagtcatgcatgagcctctcaatgtcatcactggcggaggcggagtcttccatgcgggtgaccccgacgcccctgagcggctgcacgagcgccaggtcggcgacgacgcgctcggcgaggatggcctgttgcacgcgggtgagggtgtcctggaagtcatccatgtcgacgaagcggtggtaggccccggtgttgatggtgtaggtgcagttggccatgagcgaccagttgacggtctgcaggccgggttgcacgacctcggagtacctgatccgcgagaaggcgcgcgagtcgaagacgtagtcgttgcaggtgcgcacgaggtactggtagccgactaggaagtgcggtggcggctggcggtagagcggccagcgctgggtggccggcgcgcccggggccaggtcctcgagcatgaggcggtggtagccgtagaggtagcgggacatccaggtgatgccggcggcggtggtggaggcgcgcgggaactcgcggacgcggttccagatgttgcgcagcggcaggaaatagtccatggtcggcacggtctggccggtgagacgcgcgcagtcattgacgctctagaggcaaaaacgaaagcggttgagcgggctcttcctccgtagcctggcggaacgcaaacgggttaggccgcgtgtgtaccccggttcgagtcccctcgaatcaggctggagccgcgactaacgtggtattggcactcccgtctcgacccgagcccgatagccgccaggatacggcggagagccctttttgccggccgagggggtcgctagacttgaaagcggctgaaaaccccgccgggtagtggctcgcgcccgtagtctggagaagcatcgccagggttgagtcgcggcgagcgggacttggtcaccccgccgatttaaagacccacagccagccgacttctccagttacgggagcgagcccccttttttctttttgccagatgcatcccgtcctgcgccaaatgcgtcccacccccccggcgaccaccgcgaccgcggccgtagcaggcgccggcgctagccagccacagacagagatggacttggaagagggcgaagggctggcaagactgggggcgccgtccccggagcgacacccccgcgtgcagctgcagaaggacgtgcgcccggcgtacgtgcctgcgcagaacctgttcagggaccgcagcggggaggagcccgaggagatgcgcgactgccggtttcgggcgggcagggagctgcgcgagggcctggaccgccagcgcgtgctgcgcgacgaggatttcgagccgaacgagcagacggggatcagccccgcgcgcgcgcacgtggcggcggccaacctggtgacggcctacgaacagacggtgaagcaggagcgcaacttccaaaagagtttcaacaaccacgtgcgcacgctgatcgcgcgcgaggaggtggccctgggcctgatgcacctgtgggacctggcggaggccatcgtgcagaacccggacagcaagcctctgacggcgcagctgttcctggtggtgcagcacagcagggacaacgaggcgttcagggaggcactgctgaacatcgccgagcccgagggtcgctggctgctggagctgatcaacatcttgcagagcatcgtagtgcaggagcgcagcctgagcctggccgagaaggtggcggcgatcaactactcggtgctgagcctgggcaagttttacgcgcgcaagatttacaagacgccgtacgtgcccatagacaaggaggtgaagatagacagcttttacatgcgcatggcgctcaaggtgctgacgctgagcgacgacctgggcgtgtaccgcaacgaccgcatccacaaggccgtgagcacgagccggcggcgcgagctaagcgaccgcgagctgatgctgagccttcgccgggcgctggtagggggcgctgccggcggcgaggagtcctacttcgacatgggggcggacctgcattggcagccgagccggcgcgccttggaggccgcctacggtccagaggacttggaagaggatgaggaagaggaggaggatgcacccgctgcggggtactgacgcctccgtgatgtgtttttagatgcagcaagccccggaccccgccataagggcggcgctgcaaagccagccgtccggtatagcatcggacgactgggaggccgcgatgcaacgcatcatggccctgacgacccgcaaccccgagtcctttagacaacagccgcaggccaacagactctcggccattctggaggcggtggtcccctctcggaccaaccccacgcacgagaaggtgctggcgatcgtgaacgcgctggcggagaacaaggccatccgtcccgacgaggccgggctggtgtacaacgccctgctggagcgcgtgggccgctacaacagcacgaacgtgcagtccaacctggaccggctggtgacggacgtgcgcgaggccgtggcgcagcgcgagcggttcaagaacgagggcctgggctcgctggtggcgctgaacgccttcctggcgacgcagccggcgaacgtgccgcgcgggcaggacgattacaccaactttatcagcgcgctgcggctgatggtgaccgaggttccccagagcgaggtgtaccagtctggcccggactactttttccagacgagccggcagggcttgcagacggtgaacctgagccaggctttcaagaacctgcgcgggctgtggggcgtgcaggcgcccgtgggcgaccggtcgacggtgagcagcttgctgacgcccaactcgcgtctgctgctgctgctgatcgcgcccttcaccgacagcggcagcgtgaaccgcaactcgtacctgggccatctgctgacgctgtaccgcgaggccataggccaggcgcaggtggacgagcagaccttccaggagatcactagcgtgagccgcgcgctggggcagaacgacaccgacagtctgagggccaccctgaacttcttgctgaccaatagacagcagaagatcccggcgcaatatgcgctgtcggccgaggaggaaaggatcctgagatatgtgcagcagagcgtagggctgttcctgatgcaggagggggccacccccagcgccgcgctggacatgaccgcgcgcaacatggaacctagcatgtacgccgccaaccggccgttcatcaataagctgatggactacctgcaccgcgcggcggtcatgaacacggactactttacaaacgccatcctgaacccgcactggctcccgccgccggggttctacacgggcgagtacgacatgcccgaccccaacgacgggttcctgtgggacgacgtggacagcgtggtgttctcgccgacctttcaaaagcgccaggaggcgccgccgagcgagggcgcggtggggaggagcccctttcctagcttagggagtttgcatagcttgccgggctcggtgaacagcggcagggtgagccggccgcgcttgctgggcgaggacgagtacctgaacgactcgctgctgcagccgccacgggccaagaacgccatggccaataacggtatagagagtctggtggacaaactgaaccgttggaagacctacgctcaggaccatagggatgcgcccgcgccgcggcgacagcgccacgaccggcagcggggcctggtgtgggacgacgaggactcggccgacgatagcagcgtgttggacttgggcgggagcggtggggtcaacccgttcgcgcatctgcagcccaaactggggcgacggatgttttgaaatgcaaaataaaactcaccaaggccatagcgtgcgttctcttccttgttagagatgaggcgtgcggtggtgtcttcctctcctcctccctcgtacgagagcgtgatggcgcaggcgaccctggaggttccgtttgtgcctccgcggtatatggctcctacggagggcagaaacagcattcgttactcggagctggctccgcagtacgacaccactcgcgtgtacttggtggacaacaagtcggcggacatcgcttccctgaactaccaaaacgaccacagcaacttcctgaccacggtggtgcagaacaacgatttcacccccgccgaggccagcacgcagacgataaattttgacgagcggtcgcggtggggcggtgatctgaagaccattctgcacactaacatgcccaatgtgaacgagtacatgttcaccagcaagtttaaggcgcgggtgatggtggctaggaagcatccagagggggtagttgaaacagatttgagtcaggataagcttgaatatgagtggtttgagtttaccctgcccgagggaaacttttccgagaccatgaccatagacctgatgaacaacgccatcttggaaaactacttgcaagtggggcggcaaaatggcgtgctggagagcgatatcggagtcaagtttgacagcagaaatttcaagctgggctgggacccggtgaccaagctggtgatgccaggggtctacacctacgaggccttccacccggacgtggtgctgctgccgggctgcggggtggacttcaccgagagccgcctgagcaacctcctgggcattcgcaagaagcaacctttccaagagggcttcagaatcatgtatgaggatctagaaggtggcaacatccccgccctccttgatgtgcccaagtacttggaaagcaagaagaaagttgaagacgaaactaaaaatgcagctgcggccacagccgatacaaccactaggggtgatacatttgcaactccagcgcaagagacagcagctgataagaaggtagaagtcttgcccattgaaaaggatgagagtggtagaagttacaacctgatccaggggacccacgacacgctgtaccgcagttggtacctgtcctatacctacggggaccccgagaagggggtgcagtcgtggacgctgctcaccaccccggacgttacctgcggcgcggagcaagtctactggtcactgccggacctcatgcaagaccccgtcaccttccgctccacccagcaagtcagcaactaccccgtggtcggcgccgagctcatgcccttccgcgccaagagcttttacaacgacctcgccgtctactcccagctcatccgcagctacacctccctcacccacgtcttcaaccgcttccccgacaaccagatcctctgccgcccgcccgcgcccaccatcaccaccgtcagtgaaaacgtgcctgctctcacagatcacgggacgctaccgctgcgcagcagtatccgcggagtccagcgagtgaccgtcactgacgcccgtcgccgcacctgtccctacgtctacaaggccctgggcatagtcgcgccgcgcgtgctttccagtcgcaccttctaaaaaaatgtctattctcatctcgcccagcaataacaccggctggggtcttactagacccagcaccatgtacggaggagccaagaagcgctcccagcagcaccccgtccgcgtccgcggccacttccgcgctccctggggcgcttacaagcgcgggcggacttccaccgccgtgcgcaccaccgtcgacgacgtcatcgactcggtggtcgccgacgcgcgcaactacactcccgccccctccaccgtggacgcggtcatcgacagcgtggtggccgacgcgcgcgactatgccagacgcaagagccggcggcgacggatcgccaggcgccaccggagcacgcccgccatgcgcgccgcccgggctctgctgcgccgcgccagacgcacgggccgccgggccatgatgcgagccgcgcgccgcgctgccactgcacccacccccgcaggcaggactcgcagacgagcggccgccgccgccgctgcggccatctctagcatgaccagacccaggcgcggaaacgtgtactgggtgcgcgactccgtcacgggcgtgcgcgtgcccgtgcgcacccgtcctcctcgtccctgatctaatgcttgtgtcctcccccgcaagcgacgatgtcaaagcgcaaaatcaaggaggagatgctccaggtcgtcgccccggagatttacggaccaccccaggcggaccagaaaccccgcaaaatcaagcgggttaaaaaaaaggatgaggtggacgagggggcagtagagtttgtgcgcgagttcgctccgcggcggcgcgtaaattggaaggggcgcagggtgcagcgcgtgttgcggcccggcacggcggtggtgttcacgcccggcgagcggtcctcggtcaggagcaagcgtagctatgacgaggtgtacggcgacgacgacatcctggaccaggcggcggagcgggcgggcgagttcgcctacgggaagcggtcgcgcgaagaggagctgatctcgctgccgctggacgaaagcaaccccacgccgagcctgaagcccgtgaccctgcagcaggtgctgccccaggcggtgctgctgccgagccgcggggtcaagcgcgagggcgagagcatgtacccgaccatgcagatcatggtgcccaagcgccggcgcgtggaggacgtgctggacaccgtgaaaatggatgtggagcccgaggtcaaggtgcgccccatcaagcaggtggcgccgggcctgggcgtgcaaaccgtggacattcagatccccaccgacatggatgtcgacaaaaaaccctcgaccagcatcgaggtgcaaaccgacccctggctcccagcctccaccgctaccgtctccacttctaccgccgccacggctaccgagcctcccaggaggcgaagatggggcgccgccagccggctgatgcccaactacgtgttgcatccttccatcatcccgacgccgggctaccgcggcacccggtactacgccagccgccggcgcccagccagcaaacgccgccgccgcaccgccacccgccgccgtctggcccccgcccgcgtgcgccgcgtgaccacgcgccggggccgctcgctcgttctgcccaccgtgcgctaccaccccagcatcctttaattcgtgtgctgtgatactgttgcagagagatggctctcacttgccgcctgcgcatccccgtcccgaattaccgaggaagatcccgccgcaggagaggcatggcaggcagcggcctgaaccgccgccggcggcgggccatgcgcaggcgcctgagtggcggctttctgcccgcgctcatccccataatcgccgcggccatcggcacgatcccgggcatagcttccgttgcgctgcaggcgtcgcagcgccgttgatgtgcgaataaaagcctctttagactctgacacacctggtcctgtatatttttagaatggaagacatcaattttgcgtccctggctccgcggcacggcacgcggccgttcatgggcacctggaacgagatcggcaccagccagctgaacgggggcgccttcaattggagcagtgtctggagcgggcttaaaaatttcggctcgacgctccggacctatgggaacaaggcctggaatagtagcacggggcagttgctaagggaaaagctcaaagaccagaactttcagcagaaggtggtggacgggctggcctcgggcattaacggggtggtggacatcgcgaaccaggccgtgcagcgcgagataaacagccgcctggacccgcggccgcccacggtggtggagatggaagatgcaactcttccgccgcccaaaggcgagaagcggccgcggcccgacgcggaggagacgatcctgcaggtggacgagccgccctcgtacgaggaggccgtcaaggccggcatgcccaccacgcgcatcatcgcgccgctggccacgggtgtaatgaaacccgccacccttgacctgcctccaccacccgcgcccgctccaccgaaggcaactccggttgtgcaggcccccccggtggcgaccgccgtgcgccgcgtccccgcccgccgccaggcccagaactggcagagcacgttgcacagtatcgtaggcctgggagtgaaaagtctgaagcgccgccgatgctattgaaagagaggaaagaggacactaaagggagagcttaacttgtatgtgccttaccgccagagaacgcgcgaagatggccaccccctcgatgatgccgcagtgggcgtacatgcacatcgccgggcaggacgcctcggagtacctgagcccgggtctggtgcagtttgcccgcgccaccgacacgtacttcagcctgggcaacaagtttaggaaccccacggtggccccgacccacgatgtgaccacggaccggtcccagcgtctgacgctgcgcttcgtgcccgtggatcgcgaggacaccacgtactcgtacaaggcgcgcttcactctggccgtgggcgacaaccgggtgctagacatggccagcacttactttgacatccgcggcgtcctggaccgcggtcccagcttcaaaccctactcgggcacagcttacaacagcctggcccccaagagcgcccccaatccaagtcagtggaccgccaatgaaaaacaaactggcggtcaaccaaaatctgttacccaaacatttggatctgctccaatgggaggcagcaatattactattgaaggattggttattggaactaaggaggaagaaggcaatgccactgaagaaatattcgcagataaaacattccagccagaacctcaagtaggagaagaaaactggcaggaaacagaagccttctatggaggaagggctcttaaaaaggataccaaaatgaaaccatgttacggttcatttgctagacccaccaatgaaaaaggagggcaagcaaaattaaagctcaacgatcagggtcagccaactaaagattatgacatagacctggcattctttgatactccgggcggaacacctccaacaggcagtggtcaacaggaagaatacaaagcagacattgttatgtacactgaaaatgtcaaccttgaaaccccagacacccacgtggtatataagccaggaaaagaggatgagagttctgaaacaaatttgacacagcagtccatgcccaacagacctaactacattggctttagggacaactttgtggggctcatgtattacaacagcaccggcaatatgggtgtgctggctggtcaggcttctcagttgaacgctgtggtcgacttgcaagacagaaataccgagctatcttaccagctattgctagattctttgggcgacaggaccagatactttagcatgtggaactctgcggtggacagctatgatcccgatgtcaggatcattgagaatcacggtgtggaagatgaacttccaaactattgcttcccattgaatggtactggcaccaattccacttatcaaggcgtaaaggtgaaaacaggtcaggatggagctgaggagaccgagtgggataaagatgaaactgttgcaagacaaaatcaaatcgccaagggcaacgtctatgccatggagatcaacctccaggccaacctgtggaagagttttctgtactcgaacgtagccctgtacctgcctgactcatacaagtacacgccggccaacgtcacgctgcccgccaataccaacacctacgagtacatgaacggccgcgtggtagccccctcgctggtggacgcctacatcaacatcggcgcccggtggtcgctggaccccatggacaacgtcaacccattcaaccaccaccgcaacgcgggcctgcgttaccgctccatgcttctgggcaacggccgctacgtgcccttccacatccaagtgccccaaaagttctttgccatcaagaacctgctcctgctccccggctcctacacctacgagtggaacttccgcaaggatgtcaacatgatcctgcagagttccctcggaaacgacctgcgcgtcgacggcgcctccgtccgcttcgacagcgtcaacctctacgccacattcttccccatggcgcacaacaccgcctccaccctggaagccatgctgcgcaacgacaccaacgaccagtccttcaacgactacctctcggccgccaacatgctctaccccatcccggccaaggccaccaacgtgcccatctccatcccctcgcgcaactgggccgccttccgcggctggagtttcacccggctcaagaccaaagaaactccctccctcggctcgggtttcgatccctactttgtatactcgggctccatcccctatctcgatgggaccttctacctcaaccacaccttcaagaaggtctccatcatgttcgactcctcggtcagctggcccggcaacgaccggctgctcacgccgaacgagttcgagatcaagcgcagtgtcgacggggagggctacaatgtggcccaatgcaacatgaccaaggactggttcctcgtccagatgctctcccactacaacatcggctaccagggcttccacgtgcccgagggctacaaggaccgcatgtactccttcttccgcaacttccagcccatgagcaggcaggtggtcgatgagatcaactacaaggactacaaggccgtcaccctgcccttccagcacaacaactcgggcttcaccggctacctcgcacccaccatgcgtcaggggcagccctatcccgccaacttcccctacccgctcatcggccagacagccgtgccctccgtcacccagaaaaagttcctctgcgacagggtgatgtggcgcatccccttctccagcaacttcatgtccatgggcgccctcaccgacctgggtcagaacatgctctacgccaactcggctcacgcgctcgacatgaccttcgaggtggaccccatggatgagcccaccctcctctatcttctctttgaagttttcgacgtggtcagagtgcaccagccgcaccgcggcgtcatcgaggccgtctacctgcgcacgcccttctccgccggcaacgccaccacctaagcatgagcggctccagcgaaagagagctcgcggccatcgtgcgcgacctgggctgcgggccctactttttgggtacccacgacaagcgcttcccgggcttccttgccggcgacaagctggcctgcgccatcgtcaacacggccggccgcgagaccgggggcgtgcactggctcgccttcggctggaacccgcgctcgcgcacctgctacatgttcgacccctttgggttctcggaccgccggctcaagcagatttacagcttcgagtacgaggccatgctgcgccgaagcgccctggcctcctcgcccgaccgctgtctcagcctcgagcagtccacccagaccgtgcaggggcccgactccgccgcctgcggacttttctgttgcatgttcttgcatgccttcgtgcactggcccgaccgacccatggacggaaaccccaccatgaacttgctgacgggggtgcccaacggcatgctacaatcgccacaggtgctgcccaccctccggcgcaaccaggaggagctctaccgcttcctcgcgcgccactccccttactttcgctcccaccgcgccgccatcgaacacgccaccgcttttgacaaaatgaaacaactgcgtgtatctcaataaacagcacttttattttacatgcactggagtatatgcaagttatttaaaagtcgaaggggttctcgcgctcgtcgttgtgcgccgcgctggggagggccacgttgcggaactggtacttgggctgccacttgaactcggggatcaccagtttgggcactggggtctcggggaaggtctcgctccacatgcgccggctcatctgcagggcgcccagcatgtcaggcgcggagatcttgaaatcgcagttggggccggtgctctgcgcgcgcgagttgcggtacactgggttgcagcactggaacaccatcagactggggtacttcacactagccagcacgctcttgtcgctgatctgatccttgtccaggtcctcggcgttgctcaggccgaacggggtcatcttgcacagctggcggcccaggaagggcacgctctgaggcttgtggttacactcgcagtgcacgggcatcagcatcatccccgcgccgcgctgcatattcgggtagagggccttgacgaaggccgcgatctgcttgaaagcttgctgggccttggccccctcgctgaaaaacaggccgcagctcttcccgctgaactgattattcccgcacccggcatcatggacgcagcagcgcgcgtcatggctggtcagttgcaccacgctccgtccccagcggttctgggtcaccttggccttgctgggttgctccttcagcgcacgctgcccgttctcactggtcacatccatctccaccacgtggtccttgtggatcatcaccgtcccatgcagacacttgagctggccttccacctcggtgcagccgtggtcccacagggcactgccggtgcactcccagttcttgtgcgcgatcccgctgtggctgaagatgtaaccttgcaacaggcgacccatgatggtgctaaagctcttctgggtggtgaaggtcagttgcagaccgcgggcctcctcgttcatccaggtctggcacatcttttggaagatctcggtctgctcgggcatgagcttgtaagcatcgcgcaggccgctgtcgacgcggtagcgttccatcagcacattcatggtatccatgcccttctcccaggacgagaccagaggcagactcagggggttgcgcacgttcaggacaccgggggtcgcgggctcgacgatgcgttttccgtccttgccttccttcaacagaaccggcggctggctgaatcccactcccacgatcacggcttcttcctggggcatctcttcgtctgggtctaccttggtcacatgcttggtctttctggcttgcttcttttttggagggctgtccacggggaccacgtcctcctcggaagacccggatcccacccgctgatactttcggcgcttggttggcagaggaggtggcggcgaggggctcctctcctgctccggcggatagcgcgctgaaccgtggccccggggcggagtggcctctcggtccatgaaccggcgcacgtcctgactgccgccggccattgtttcctaggggaagatggaggagcagccgcgtaagcaggagcaggaggaggacttaaccacccacgagcaaccaaaaatcgagcaggacctgggcttcgaagagccggctcgtctagaacccccacaggatgaacaggagcacgagcaagacgcaggccaggaggagaccgacgctgggctcgagcatggctacctgggaggagaggaggatgtgctgctcaaacacctgcagcgccagtccctcatcctccgggacgccctggccgaccggagcgaaacccccctcagcgtcgaggagctgtgtcgggcctacgagctcaacctcttctcgccgcgcgtgccccccaaacgccagcccaacggcacatgcgagcccaacccgcgtctcaacttctatcccgtctttgcggtccccgaggccctcgccacctatcacatctttttcaagaaccaaaagatccccgtctcctgccgcgccaaccgcacccgcgccgacgcgctcctcgctctggggcccggcgcgcgcatacctgatatcgcttccctggaagaggtgcccaagatcttcgaagggctcggtcgggacgagacgcgcgcggcgaacgctctgaaagaaacagcagaggaagagggtcacactagcgccctggtagagttggaaggtgacaacgccaggctggccgtgctcaagcgcagcgtcgagctcacccactttgcctaccccgccgtcaacctcccgcccaaggtcatgcgtcgcatcatggatcagctcatcatgccccacatcgaggccctcgatgaaagtcaggagcagcgccccgaggacgcccggcccgtggtcagcgacgagatgctcgcgcgctggctcgggacccgcgagccccaggctttggaacagcggcgcaagctcatgctggccgtggtcctggtcaccctcgagctcgaatgcatgcgccgcttcttcagcgaccccgagaccctgcgcaaggtcgaggagaccctgcactacactttcagacacggtttcgtcaggcaggcctgcaagatttccaacgtggagctgaccaacctggtctcctgcctggggatcctgcatgagaaccgcctgggacagaccgtactccactctaccctcaagggcgaggcgcggagggactatgtccgcgactgcgtctttctctttctctgccacacatggcaagcagccatgggcgtgtggcagcagtgtctcgaggacgagaacctgaaggaactggacaagcttcttgctagaaaccttaaaaagctttggacgggcttcgacgagcgcaccgtcgcctcggacctggccgagatcgtcttccccgagcgcctgaggcagacgctgaaaggcgggctgcccgacttcatgagccagagcatgttgcaaaactaccgcactttcattctcgagcgatcggggatgctgcccgccacctgcaacgctttcccctccgactttgtcccgctgagctaccgcgagtgtcccccgccgctgtggagccactgctacctcttgcagctggccaactacatcgcctaccactcggacgtgatcgaggacgtgagcggcgaggggctgctcgagtgccactgccgctgcaacctgtgctccccgcaccgctccctggtctgcaacccccagctccttagcgagacccaggtcatcggtaccttcgagctgcaaggtccgcaggagtccaccgctccgctgaaactcacgccggggttgtggacttccgcgtacctgcgcaaatttgtacccgaggactaccacgcccatgagataaagttcttcgaggaccaatcgcgtccgcagcacgcggatctcacggcctgcgtcatcacccagggcgcgatcctcgcccaattgcacgccatccaaaaatcccgccaagagtttcttctgaaaaagggtagaggggtctacctggacccccagacgggcgaggtgctcaacccgggtctcccccagcatgccgaggaagaagcaggagccgctagtggaggagatggaagaagaatgggacagccaggcagaggaggacgaatgggaggaggagacagaggaggaagaattggaagaggtggaagaggagcaggcaacagagcagcccgtcgccgcaccatccgcgccggcagccccgccggtcacggatacaacctccgcagctccggccaagcctcctcgtagatgggatcgagtgaagggtgacggtaagcacgagcggcagggctaccgatcatggagggcccacaaagccgcgatcatcgcctgcttgcaagactgcggggggaacatcgctttcgcccgccgctacctgctcttccaccgcggggtgaacatcccccgcaacgtgttgcattactaccgtcaccttcacagctaagaaaaagcaagtaagaggagtcgccggaggaggcctgaggatcgcggcgaacgagccctcgaccaccagggagctgaggaaccggatcttccccactctttatgccatttttcagcagagtcgaggtcagcagcaagagctcaaagtaaaaaaccggtctctgcgctcgctcacccgcagttgcttgtaccacaaaaacgaagatcagctgcagcgcactctcgaagacgccgaggctctgttccacaagtactgcgcgctcactcttaaagactaaggcgcgcccacccggaaaaaaggcgggaattacctcatcgccaccatgagcaaggagattcccaccccttacatgtggagctatcagccccagatgggcctggccgcgggcgcctcccaagactactccacccgcatgaactggctcagtgccggcccctcgatgatatcacgggtcaacggggtccgtaaccatcgaaaccagatattgttggagcaggcggcggtcacctccacgcccagggcaaagctcaacccgcgtaattggccctccaccctggtgtatcaggaaatccccgggccgactaccgtactacttccgcgtgacgcactggccgaagtccgcatgactaactcaggtgtccagctggccggcggcgcttcccggtgcccgctccgcccacaatcgggtataaaaaccctggtgatccgaggcagaggcacacagctcaacgacgagttggtgagctcttcgatcggtctgcgaccggacggagtgttccaactagccggagccgggagatcgtccttcactcccaaccaggcctacctgaccttgcagagcagctcttcggagcctcgctccggaggcatcggaaccctccagtttgtggaggagtttgtgccctcggtctacttcaaccccttctcgggatcgccaggcctctacccggacgagttcataccgaacttcgacgcagtgagagaagcggtggacggctacgactgaatgtcccatggtgactcggctgagctcgctcggttgaggcatctggaccactgccgccgcctgcgctgcttcgcccgggagagctgcggactcatctactttgagtttcccgaggagcaccccaacggccctgcacacggagtgcggatcaccgtagagggcaccaccgagtctcacctggtcaggttcttcacccagcaacccttcctggtcgagcgggaccggggcgccaccacctacaccgtctactgcatctgtccgaccccgaagtcgcatgagaatttttgctgtactctttgtggtgagtttaataaaagctaaactcttgcaatactctggaccttgtcgtcatcaactcaacgagaccgtctacctcaccaaccagactgaggtaaaactcacctgcagaccacacaagacctatatcatctggttcttcgagaacacctcatttgcagtctcaaacactcactgcaacgacggtgttgaacttccaaacaacctttccagtggactgagttacgatacacatagagctaagctcgtcctctacaatcctttcgtagagggaacctaccactgccagagcggaccttgcttccacagttttactttggtgaacgttaccggcagcagcacagccgctccagaacctaaccttccttctgatactatcaaacctcgtttcggaggtgagctaaggcttcccccttctgaggagggggttagcccatacgaagtggtcgggtatttgattttaggggtggtcctgggtgggtgcatagcggtgctagctcagctgccttgctgggtggaaatcaaaatctttatatgctgggtcagacattgtgggaaggaactatgaaggggctcttgctgattatcctttccctggtggggggtgtgctgtcatgccacgaacagccacgatgtaacatcaccacaggcaatgagaggaacgactgctctgtagttattaaatgcgagcaccattgtcctctcaacatcacattcaagaataagaccatgggaaatgtatgggtgggattctggcaaccaggagatgagcagaactacacggtcactgtccatggtagcgatggcaatcacactttcggtttcaaattcatttttgaagtcatgtgtgatatcacactacatgtggctagacttcatggcttgtggccccctaccaaggagaacatggtgggtttttctttggcttttgtgatcatggcctgcttgatgtcaggtctgctggtaggggctctagtgtggtttctgaagcgcaagcccaggtacggaaatgaggagaaggaaaaattgctataaattctttttctcttcgcagaaccatgaatacagtgttccgtatcgtgctgctctctcttcttgtagctttcggtcaggcaggaattcatattattaatgctacatggtgggataatataactttagtgggaccctcagatactccagttacctggtatgatggcaatggattgcaattttgtgacggaagtacagttaagaatccgcagataagacatacttgtaatgatcaaaacttaactctgattcatgttaacaaaacccatgaaagaacatacatgggttacagacatgacagtaagggaaaagtagactataaggttacagtcattccacctcctcctgctactgtaaagccacaaccagatccagaaaatgtctttgtttatatgggagataatgtaactttagttggacctccaggaattccagttagttggtattatcataatggcacacagttctgcgatggagataaaattattcatccagaattcaaccacacctgtgataaacaaaaccttacactgctgtttgtaaactttacacatgacggaggctatcttggattcaattacaaaggtactaaaagaactcagtatgaggttatagttttagatcgatttccaaattctggtcagatgaaaattgaagaacaaagtgaggaaacagaacagaaacatactgagcaaaataaggctggacaaaagcagggtatagatacaaatcaaaagaaatctaataacagacaaaagccatctcaaaggccatcaagaagacggccgacaaacactcctgagacaaaacaacttacagtgtctattgggtctaacttaactttagttggtccagatggaaaagtcacttggtatgatggtgatttaaaaagaccatgtgaagaacaaaactataggcttccacatcagtgtagtactcagaacttaactttaattaatgtaactaaatctcatgagggaacttactatggcactaatgacaaagacgaaagcaaaagatacagagtgaaagtgaacactacaaattctcaagctgtaaaaattaacccatataccagacctactactcctgatcagaaacacagatttgaattgcaaattgaaaataatgcaaatgatgaagaatcaaaaattccatctactactgtggcaatcgtggtgggagtgattgcgggcttcataactataatcattgtcattctgtgctacatctgctgccgcaagcgtcccagggcatacaatcatatggtagacccactactcagcttctcttactgagactcagtcactttcatttcagaaccatgaaggctttcacagcttgcgttctgattagcctagtcacacttagttcagctgcaggatatactcaagttaatgttactagagatggtagtataaatcttaaaggaccatacactaataccacatggtccagatttcacttgaacgcatggcaatttatttgcacatggaatgtgacagcatatgtatgtcacaaaaatggaagcattaccatcacagctcaaaagaacataacttctggagtattgaaagccgatgggtttcatgtaaattcatatggatatgaaaatcaaaaactgattttatataatttaacaatcattgagcatccaaccactaaagcgccaactactactaggcccaccacaattaggtcaaccatggaaacaaccacgcagcctaccactactcatactacacagatagacacaacactacagaatactactttattaattggatttttactgagagagaatgaaagtactactgatcagacagaggctacctcaagtgccttcagcagcactgcaaatttaacttcgcttgcttggactaatgaaaccggagtatcattgatgaatcgtcagcctttctcaggtttggatattcaaattacttttctggttgtctgtgggatctttattcttgcggttcttctgtactttgtctgctgcaaagccagagagaaatctaggaggcccatctacaggccagtaatcggggagcctcagcccctccaagtggatggaggcttaagaaatcttctcttctcttttacagtatggtgatcagccatgattcctaggttcttcctatttaacatcctcttctgtctcttcaacatctgtgctgccttcgcggccgtctcgcacgcctcgcccgactgtctcgggcccttcccaacctacctcctctttgctctgctcacctgcacctgcgtctgcagcattgtctgcctggtcatcaccttcctgcagctcatcgactggtgctgcgcgcgctacaattatctccatcacagtcccgaatacagggacgagaacgtagccagaatcttaaggctcatctgaccatgcagactctgctcatgctgctatccctcctatcccctgccctagccacttctgctgattactctaagtgcaaattcgcagacatatggaatttcttagattgctatcaggaaaaaattgatatgccctcctattacttggtgattgtgggaatagtcatggtctgctcctgcactttctttgccatcatgatctacccctgttttgatctcggctggaactctgttgaagcattcacatacacactagaaagcagttcactagcctccacgccaccgcccacaccgcctcctcgcagaaatcagttcccactgatacagtacttagaagagccccctccccgacccccttccactgttagctactttcacataaccggcggcgatgactgaccacctggacctcgagatggacggccaggcctccgagcagcgcaccctgcaactgcgcgttcgtcagcagcaggagcgggccgccaaggagctcctcgatgccatcaacatccaccagtgcaagaagggtatcttctgcctggtcaaacaggcaaagatcacctacgagctcctgtccggcggcaagcagcatcgcctcgcctatgagctgcctcagcagaagcagaagttcacctgcatggtgggcatcaaccccatagtcatcacccagcagtcgggcgagaccagcggctgcatccactgctcctgtgaaagccccgagtgcatctactccctgctcaagaccctttgcggactccgcgacctcctgcccatgaactgatgttgattaaagcccagaaaccaatcaaacccctttgcccaaataaacaatcattggaaataatcattcaataaagatcacttacttgaaatctgaaagtatgtctctggtgtagttgttcagcagcacctcggtaccctcctcccagctttggtactccagtccccggcgggcggcgaacttcctccacaccttgaaagggatgtcaaattcctggtccacaattttcattgtcttccctctcagatggcaaagaggctccgggtggaagatgacttcaaccccgtctacccctatggctacgcgcggaatcagaatatccccttcctcactcccccctttgtctcctccgatggattccaaaacttcccccctggggtcctgtcactcaaactggctgacccaatcgctatcaccaatgggaatgtctcactcaaggtgggagggggacttactgtagagcaacagactggaaacctaagtgtgaaccctgccgcccccttgcaagttgcaagtgataagctacagcttgtcctagctcctccatttgaggtaaaagacggaaaactttcattaaaaacaggcaatggattaaaagtaatagataaaagcatcacagacctaccaggattaatagatacacttgctgttttaactggaaagggaattggaacagaagaactaaaaaatgaaaatggaactaataaaggtgttggtttgcgcgttagactcgctgatgacggtggattaacatttgatgaaaagggtgacctcgtagcatggaatgttaagcatgacactcgcaccctttggacaacaccagacacttctccaaactgcacaattgctcaggataaggactctaaactaactcttgttcttacaaagtgcggaagtcaaatattggcaaatgtgtctttgattgtggtcgcaggaaagtaccacatcataaataataagaataatccagaaataaaaagttttactattaaacttctatttgataagaacggagtgcttttagacaactcaaatcttggaaaaacttattggaactttagaagtggagattccaatgtttcgacagcttatgaaaaagcaattggttttatgcctaatttggtagcgtatccgaaacccagtaattctaaaaaatatgcaagagacatagtttatggaactatatatcttggtggaaaacctgatcagccagcagtcattaaaactacctttaaccaagaaactggatgtgaatactctataacatttgactttagttggtccaaaacctatgaaaatgttgaatttgaaaccacctcttttaccttctcctatatcgcccaacaatgaaagaccaataaacgtgtttttcatttgaaaattttcatgtatctttattgatttttacaccagcacgggtagtcagtctcccaccaccagcccatttcacagtgtaaacaattctctcagcacgggtggccttaaatagggcaatattctgattagtgcgggaactggacttggggtctataatccacacagtttcctggcgagccaaacgggggtcggtgattgagatgaagccgtcctctgaaaagtcatccaagcgagcctcacagtccaaggtcacagtctggtggaatgagaagaacgcacagattcatactcggaaaacaggatgggtctgtgcctctccatcagcgccctcagcagtctctgccgtcggggctctgtgcggctgctgcagatgggatcgggatcgcaagtctctctgactataatccccacagccttcagcatcagtctcctggtgcgtcgggcacagcaccgcatcctgatctctgccatgttctcacagtaagtgcagcacataatcaccatgttattcagcagcccataattcagggcgctccagccaaagctcatgttggggatgatggaacccacgtgaccatcgtaccagatgcggcagtatatcaggtgcctgcccctcataaacacactgcccatatacatgatctctttgggcatgtttctgttcacaatctgacggtaccaggggaagcgctggttgaacatgcacccgtaaatgactctcctgaaccacacggccagcagggtgcctcccgcccgacactgcagggagcccggggatgaacagtggcaatgcaggatccagcgctcgtacccgctcaccatctgagctctcaccaagtccagggtagcagggcacaggcacactgacatacatctttttaaaatttttatttcctctggggtcaggatcatatcccaggggactggaaactcttggagcagggtaaagccagcagcacatggtaatccacggacagaacttacattatgataatctgcatgatcacaatcgggcaacaggggatgttgttcagtcagtgaagccctggtttcctcatcagatcgtggtaaacgggccctgcgatatggatgatggcggagcgagctggattgaatctcggtttgcattgtagtggattctcttgcgtaccttgtcgtacttctgccagcagaaatgggcccttgaacagcagatacccctcctgcggccgtcctttcgctgctgccgctcagtcatccaactgaagtacatccattctcgaagattctggagaagttcctctgcatctgatgaaataaaaaacccgtccatgcgaattcccctcatcacatcagccaggactctgtaggccatccccatccagttaatgctgccttgtctatcattcagagggggcggtggcaggattggaagaaccatttttattccaaacggtctcgaaggacgataaagtgcaagtcacgcaggtgacagcgttcccctccgctgtgctggtggaaacagacagccaggtcaaaacccactctattttcaaggtgctcgaccgtggcttcgagcagtggctctacgcgtacatccagcataagaatcacattaaaggctggccctccatcgatttcatcaatcatcaggttacattcctgcaccatccccaggtaattctcatttttccagccttgaattatctctacaaattgttggtgtaagtccactccgcacatgtggaaaagctcccacagtgccccctccactttcataatcaggcagaccttcataatagaaacagatcctgctgctccaccacctgcagcgtgttcaaaacaacaagattcaataaggttctgccctccgccctgagctcgcgcctcaatgtcagctgcaaaaagtcacttaagtcctgggccactacagctgacaattcagagccagggctaagcgtgggactggcaagcgtaagggaaaactttaatgctccaaagctagcacccaaaaactgcatgctggaataagctctctttgtgtctccggtgatgccttccaaaatgtgagtgataaagcgtggtagtttttctttaatcatttgcgtaatagaaaagtcctctaaataagttactaggaccccagggaccacaatgtggtagcttacaccgcgtcgctgaagcatggttagtagagatgagagtctgaaaaacagaaagcatgcactaaactaaggtggctattttcactgaaggaaaaatcactctctccagcaacagggtacccactgggtggcccttgcggacatacaaaaatcggtccgtgtgattaaaaagcagcacagtaagttcctgtcttcttccggcaaaaatcacatcggactgggttagtatgtccctggcatggtagtcattcaaggccataaatctgccctgatatccagtaggaaccagcacactcacttttaggtgaagcaataccaccccatgcggaggaatgtggaaagattctgggcaaaagaaggtatatctattgctagtcccttcctggacgggagcgatccctccaggactatctatgaaagcatacagagattcagccatagctcagcccgcttaccagtagacagagagcacagcagtacaagcgccaacagcagcgactgactacccactaacccagctccctatttaaaggcaccttacactgacgtaatgaccaaaggtctaaaaaccccgccaaaaaaacacacacgccctgggtgttttttcgcgaaaacacttccgcgttctcacttcctcgtatcgatttcgtgactcaacttccgggttcccacgttacgtcacttctgcccttacatgtaactcagtcgtagggcgccatgttgcccacgtccaaaatggtttccatgtccagccacgcctccgcggcgaccgttaacgccgtgcgtcgtgacgtcatttgcatcaacgtttctcggccaatcagcagtagccccgccctaaatttaaaacctcatttgcatattaacttttgtttactttgtggggtatattattgatgatg

SEQ ID NO: 21 - DNA, 35218 bp, Adenovirus D13
  MISC_FEATURE (1)..(35218): Complete Genome
catcatcaataatataccccacaaagtaaacaaaagttaatatgcaaatgaggttttaaatttagggcggggctactgctgattggccgagaaacgttgatgcaaatgacgtcacgacgcacggctaacggtcgccgcggaggcgtggcctagcccggaagcaagtcgcggggctgatgacgtataaaaaagcggactttagacccggaaacggccgattttcccgcggctacgcccggatatgaggtaattctgggcggatgcaagtgaaattaggtcattttggcgcgaaaactgaatgaggaagtgaaaagtgaaaaataccgggcccgcccagggcggaatatttaccgagggccgagagactttgaccgattacgtgggggtttcgattgcggtgtttttttcgcgaatttccgcgtccgtgtcaaagtccggtgtttatgtcacagatcagctgatccacagggtatttaaaccagtcgagcccgtcaagaggccactcttgagtgccagcgagtagagatttctctgagctccgctcccagagaccgagaaaaatgagacacctgcgccttctaccttcaactgtgcccggcgacctggctgtgataatgctggaggactttgtgaatacagttctggaggacgaactgcatccaacaccgttcgagctgggacccacacttcaggatctctatgatctggaggtagatgcccatgatgacgaccctaatgaagaggctgtgaatttaatatttccagaatctatgattctccaggctgacatagccagcgaagctgtagttactccacttcataccccgactctgccaccaatacctgaattggaagaggaggacgagctagaccttcggtgttatgaggaaggttttcctcccagcgattcagaggacgaacagggtgagcagagcatggctctaatctcagactatgcttgtgtgattgtggaggagcaagatgtgattgaaaaatctactgagccagtacaaggctgtaggaactgcaagtaccaccgggataagtccggagatccaaaagcctcatgtgctctgtgctatatgaaacagactttcagctttatttacagtaagtagagtgaatgcgagagagactgagtgcttaacacatatctgtgtgttgcttgaacagctgtgctaagtgtggtttatttttgttactaggtcctgtgtcagaggatgagtcatcgccctcagaagaagaccacccgtctccccctgagctgtcaggcgaaacgcccctgcaagtgcacagacccaccccagtcagacccagtggcgagaggcgagcagctgttgaaaaaattgaggacttgttgcatgacatgggtggggatgaacctttggacctgagcttgaaacgccccaggaactaggcgcagatgcgcttagtcatgtgtaaataaagttgtacaataaaaattatatgtgacgcatgcaaggtgtggtttatgactcatgggcggggcttagtcctatataagtggcaacacctgggcactcaggcacagaccttcagggagttcctgatggatgtgtggactatccttgcggactttaacaagacacgccggcttgtagaggatagttcagacgggtgctccggtttctggagacactggtttggaactcctctatctcgcctggtgtacacagtaaagaaggattatcaggaggaatttgaaaatcttttttgctgactgctctggcctgcttgattctctgaatttcggccaccagtcccttttccaggaaagggtcctccacagccttgatttttccagcccagggcgcactacagccggggttgcatttgtggtttttctggttgacaaatggagccaggacacccaactgagcaggggctacatcctggacttcgcagccatgcacctgtggagggcctggatcaggcagcggggacagagaatcttgaactactggcttctacagccagcagctccgggtcttcttcatctacacagacaaacatccatgttggaggaagaaatgagggaggccatggacgagaacccgaggagcggcctggaccctccgtcggaagaggagctggattgaatcaggtatccagcctatacccagagcttagcagggtcctgaccaacggatccataggtgcgaggggagtgaagagggagaggagcgatggtggcaataccgggatgatgaccgagctgactgccagcctgatgaatcgcaagcgcccagagtgcattacctggcatgagctacagatggagtgcagggatgaggtgggcctgatgcaggataaatatggcctggagcagataaaaactcactggttgaacccagatgaggattgggaggaggccattaagaagtatgctaagatagccctgcgcccagattgcaagtacaggatcactaagacggtgaatatcagacatgcctgctacatctcagggaatggggcagaggtggtcatcgataccctggacaagtctgccttcaggtgttgcatgatgggaatgagagccggtgtgatgaatatgaattccatgatcttcatgaacatgaagtttaatggagagaagtttaacggggtgctgttcatggccaacagccatatgaccctgcatggctgcaagttcttcggattcaacaatatgtgtgcagaggtgtggggctcagccaagatcaggggctgtgtgtattatggttgctggatgggcgtggtcggaagacccaagagcgagatgtctgtaaagcagtgtgtgtttgagaagtgctacctgggagtctctaccgagggcaatgctcgggtgagacactgttcttccatcgagacgggctgcttctgcctggtgaagggcacagcctcgctcaagcataatgtgatcaaggggtgcacggatgagcgcatgtacaacatgctgacctgcgactcgggtgtctgccatatcctgaagaacatccatatcacctcccacgctagaaagaagtggccagtgtttgagaataacatgctgatcaagtgccatgtgcacctgggtgtcagaaggggcaccttccagccgtaccagtgcaactttagccagaccaagctgctgctggagagcgatgccttctccagggtgaacctgaacggcatctttgacatggatgtctcggtgtacaagatcctgagatacgatgagaccaggtccagggtgcgcgcttgcgagtgcggaggcagacacaccaggatgcaaccagtggccctggatgtgaccgaggagctgaggcccgaccacctggtgatggcctgtaccgggaccgagttcagctccagcggggaggacacagattagaggtaggttgagtgagtagtgggcgtggctaaggtgactataaaggtgggtgtcttacgagggtctttttgcttttctgcagacatcatgaacgggaccggcggggccttcgaaggggggcttttcagcccttatttgacaacccgcctgccgggatgggccggagttcgtcagaatgtgatgggatcgacggtggatgggcgcccagtgcttccagcaaattcctcgaccatgacctacgcgaccgtggggacgagctcgtcgctcgacagcaccgccgcagccgcggcagccgcagccgccatgacagcgacgagactggcctcgagctacatgcccagcagcggtagcagcccctccgtccccagttccatcatcgccgaggagaaactgctggccctgctggccgagctggaagccctgagccgccagctggccgccctgacccagcaggtgtccgagctccgcgagcaacagcagcagcaaaataaatgattcaataaacacagattctgattcaaaagcaaagcatctttattatttattttttcgcgcgcgataggccctggtccacctctcccgatcattgagagtgcggtggattttttccaagacccggtagaggtgggattggatgttgaggtacatgggcatgagcccgtcccggggatggaggtagcaccactgcatggcctcgtgctctggggtcgtgttgtagatgatccagtcatagcaggggcgctgggcgtggtgctggatgatgtccttgaggaggagactgatggccacggggagccccttggtgtaggtgttggcgaagcggttgagctgggagggatgcatgcggggggagatgatgtgcagtttggcctggatcttgaggttggcgatattgccgcccagatcccgccgggggttcatgttgtgcaggaccaccaggacggtgtagcccgtgcacttggggaatttgtcatgcaacttggaagggaatgcgtggaagaatttggagacgcccttgtgcccgcccaggttttccatgcactcatccatgatgatggcaatgggcccgtgggctgcggctttggcaaagacgttcctgggatcagagacatcgtaattatgctcctgggtgagatcatcataagacattttaatgaatttggggcggagggtgccagattgggggacaatggttccctcgggccccggggcgaaattcccctcgcatatctgcatctcccaggctttcatctcggaggggggaatcatgtccacctgcggggcgatgaaaaaaacggtttccggggcgggggtgatgagctgcgaggagagcaggtttctcaacagctgggacttgccgcacccggtcgggccgtagatgaccccgatgacgggttgcaggtggtagttcaaggagatgcagctgccgtcgtcccggaggaggggggccacctcgttaagcatgtccctgacttggaggttttcccggacgagctcgccgaggaggcggtccccgcccagcgagaggagctcttgcagggaagcaaagtttttcaggggcttgagcccgtcggccatgggcatcttggcgagggtctgcgagaggagttccaagcggtcccagagctcggtgacgtgctctacggcatctcgatccagcagacttcctcgtttcgggggttgggacgactgcgactgtaaggcacgagacgatgggcgtccagcgctgccagcgtcatgtccttccagggtctcagggtccgcgtgagcgtggtctccgtcacggtgaaggggtgggccccgggctgggcgcttgcaagggtgcgcttgagactcatcctgctggtgctgaaacgggcacggtcttcgccctgcgcgtcggcgagatagcagttgaccatgagctcgtagttgagggcctcggcggcgtggcccttggcgcggagcttgcctttggaagagcgcccgcaggcgggacagaggagggattgcaaggcgtagagcttgggcgcgagaaagacggactcgggggcaaaggcgtccgctccacagtgggcgcagacggtctcgcactccacgagccaggtgagctcgggctgctcggggtcaaaaaccagttttcccccgttctttttgatgcgcttcttacctcgcgtctccatgagtctgtgtccgcgctcggtgacaaacaggctgtcggtgtccccgtagacggacttgatgggcctgtcctgcaggggcgtcccgcggtcctcctcgtagagaaactcggaccactctgagacgaaggcgcgcgtccacgccaagacaaaggaggccacgtgcgaggggtagcggtcgttgtccaccagggggtccaccttttccaccgtgtgcaggcacatgtccccctcctccgcatccaagaaggtgattggcttgtaggtgtaggccacgtgaccgggggtccccgacgggggggtataaaagggggcgggtctgtgctcgtcctcactctcttccgcgtcgctgtccacgagcgccagctgttggggtaagtattccctctcgagagcgggcatgacctcggcactcaggttgtcagtttctagaaacgaggaggatttgatgttagcttgccctgccgcgatgcttttcaggagactttcattcatctggtcagaaaagactatttttttattgtcaagcttggtggcgaaggagccatagagggcgtttgaaagtagcttggcgatggatctcatggtctgatttttgtcacggtcggcgcgctccttggccgcgatgttgagctggacatactcgcgcgctacgcacttccattcggggaagacggtggtgcgctcgtctggcacgatcctgacgcgccagccgcggttatgcagggtgaccaggtccacgctggtggccacctcgccgcgcaggggctcattcgtccagcagaggcgcccgcccttgcgcgagcagaaagggggcaacacatcaagcagatgctcgtcaggggggtccgcatcgatagtgaagatgcccggacagagttccttgtcaaaataatcgatttttgaggatgcatcatccaaggccatctgccactcgcgggcggccagcgctcgctcgtagggattgaggggcggaccccagggcatgggatgcgtgagcgcggaggcgtacatgccgcagatgtcatagacatagatgggctccgagaggatgccgatgtaggtgggataacagcgccccccgcggatgctggcgcgcacatagtcatacaactcgtgcgagggtgccaaaaaggcggggccgagattggtgcgttgcggctgctcggcgcggaagacgatctggcgaaagatggcatgcgagttggaagagatggtgggcctttggaagatgttaaagtgggcgtgaggcaggcggaccgagtcgcggatgaagtgcgcgtaggagtcttgcagcttggcgacgagctcggcggtgacgaggacgtccatggcgcagtagtcgagcgtttcgcggatgatgtcataacccggctctcctttcttctcccacagctcgcggttgagggcgtactcctcgtcatccttccagtactcccggagcgggaatcctcgatcgtccgcacggtaagagcccagcatgtagaattggttcacggccttgtagggacagcagcccttctccaccgggagggcgtaagcttgagcggccttgcggagcgaggtgtgcgtcagggcgaaggtgtccctgaccatgactttcaagaactggtacttgaaatccgagtcgtcgcagccgccgtgctcccagagctcgaaatcggtgcgcttcttcgagagggggttaggcagagcgaaagtgacgtcattgaagagaatcttgcctgcccgcggcatgaaattgcgggtgatgcggaaagggcccgggacggaggctcggttgttgatgacctgggcggcgaggacgatctcgtcgaagccgttgatgttgtgcccgacgatgtaaagttccatgaatcgcgggcggcctttgatgtgcggcagctttttgagctcctcgtaggtgaggtcctcggggcattgcaggccgtgctgctcgagcgcccactcctggagatgtgggttggcacgcatgaaggaagcccagagctcgcgggccatgagggtctggagctcgtcgcgaaagaggcggaactgttggcccacggccatcttttcgggggtgacgcagtagaaggtgagggggtcccgctcccagcgatcccagcgtaagcgcacggcgagatcgcgagcgagggcgaccagctcggggtccccggagaatttcatgaccagcatgaaggggacgagctgcttgccgaaggaccccatccaggtgtaggtttctacatcgtaggtgacaaagagccgctccgtgcgaggatgagagccgatggggaagaactggatttcctgccaccagttggacgagtggctgttgatgtgatgaaagtagaaatcccgccggcgaaccgagcactcatgctgatgcttgtaaaagcgtccgcagtactcgcagcgctgcacgggctgtacctcatccacgagatacacagcgcgtcccttgaggaggaacttcaggagtggcggccctggctggtggttttcatgttcgcctgcgtgggactcaccctggggctcctcgaggacggagaggttgacgagcccgcgcgggagccaggtccagatctcggcgcggcgggggcggagagcgaagacgagggcgcgcagttgggagctgtccatggtgtcgcggagatccaggtccgggggcagggttctgaggttgacctcgtagaggcgggtgagggcgtgcttgagatgcagatggtacttgatttctacgggtgagttggtggccgtgtccacgcattgcatgagcccgtagctgcgcggggccacgaccgtgccgcgctttagaagcggtgtcgcggacgcgctcccggcggcagcggcggttccggccccgcgggcaggggcggcagaggcacgtcggcgtggcgctcgggcaggtcccggtgctgcgccctgagagcgctggcgtgcgcgacgacgcggcggttgacatcctggatctgccgcctctgcgtgaagaccacgggccccgtgactttgaacctgaaagacagttcaacagaatcaatctcggcgtcattgacggcggcctgacgcaggatctcttgcacgtcgcccgagttgtcctggtaggcgatctcggacatgaactgctcgatctcctcctcctggagatcgccgcggcccgcgcgctcgacggtggcggcgaggtcgttggagatgcgacccatgagctgcgagaaggcgcccaggccgctctcgttccagacgcggctgtagaccacgtccccgtcggcgtctcgcgcgcgcatgaccacctgcgcgaagttgagctccacgtgccgcgcgaagacggcgtagttgcgcaggcgctggaagaggtagttgagggtggtggcgatgtgctcggtgacaaagaagtacatgatccagcggcgcaggggcatctcgctgatgtcgccgatggcctccagcctttccatggcctcgtagaagtccacggcgaagttgaaaaactgggcgttgcgggccgagaccgtgagctcgtcttccaggagccggatgagctcggcgatggtggcgcgcacctcgcgctcgaaatccccgggggcctcctcctcttcctcttcttcttccatgacgacctcttctatttcttcctctgggggcggtggtggcggggcccgacgacgacggcgacgcaccgggagacggtcgacgaagcgctcgatcatctccccgcggcggcgacgcatggtttcggtgacggcgcgaccccgttcgcgaggacgcagcgtgaagacgccgccggtcatctcccggtaatggggcgggtccccgttgggcagcgagagggcgctgactatgcatcttatcaattgcggtgtaggggacgtgagcgcgtcgagatcgaccggatcggagaatctttcgaggaaagcgtctagccaatcgcagtcgcaaggtaagctcagacacgtagcagccctgtggacgctgttagaattgcggttgctgatgatgtaattgaagtaggcgtttttgaggcggcggatggtggcgaggaggaccaggtccttgggtcccgcttgctggatgcggagccgctcggccatgccccaggcctggccctgacaccggctcaggttcttgtagtagtcatgcatgagcctctcgatgtcatcactggcggaggcggagtcttccatgcgggtgaccccgacgcccctgagcggctgcacgagcgccaggtcggcgacgacgcgctcggcgaggatggcctgttgcacgcgggtgagggtgtcctggaagtcgtccatgtcgacgaagcggtggtaggccccggtgttgatggtgtaggtgcagttggccatgagcgaccagttgacggtctgcaggccgggctgcacgacctcggagtacctgagccgcgagaaggcgcgcgagtcgaagacgtagtcgttgcaggtgcgcacgaggtactggtagcccactaggaagtgcggcggcggctggcggtagagcggccagcgctgggtggccggcgcgcccggggccaggtcctcgagcatgaggcggtggtagccgtagaggtagcgggacatccaggtgatgccggcggcggtggtggaggcgcgcgggaactcgcggacgcggttccagatgttgcgcagcggcaggaaatagtccatggtcggcacggtctggccggtgagacgcgcgcagtcattgacgctctagaggcaaaaacgaaagcggttcagcgggctcttcctccgtagcctggcggaacgcaaacgggttaggccgcgcgtgtaccccggttcgagtcccctcgaatcaggctggagccgcgactaacgtggtattggcactcccgtctcgacccgagcccgatagccgccaggatacggcggagagccctttttgcaggccgcgcggggtcgctagacttgaaagcggccgaaaaccccgccgggtagtggctcgcgcccgtagtctggagaagcatcgccagggttgagtcgcggcagaacccggttcgcggacggccgcggcgagcgggaattggtcaccccgcctatttaaagacccacagccagccgacttctccagttacgggagcgagcccccttttttctttttgccagatgcatcccgtcctgcgccaaatgcgtcccacccccccggcgaccaccgcgaccgcggccgtagcaggcgccggcgctagccagccacagccacagacagaaatggacttggaagagggcgaagggctggcgagactgggggcgccgtccccggagcgacacccccgcgtgcagctgcagaaggacgtgcgcccggcgtacgtgcccgcgcagaacctgttcagggaccgcagcggggaggagcccgaggagatgcgcgactgccggtttcgggcgggcagggagctgcgcgatggcctggaccgccagcgcgtgctgcgcgacgaggatttcgagccgaacgagcagacggggatcagccccgcgcgcgcgcacgtggcggcggccaacctggtgacggcctacgagcagacggtgaagcaggagcgcaacttccaaaagagtttcaacaaccacgtgcgcaccctgatcgcgcgcgaggaggtggccctgggtctgatgcacctgtgggacctggcggaggccatcgtgcagaacccggacagcaagcctctgacggcgcagctgttcctggtggtgcagcacagcagggacaatgaggcgttcagggaggcgctgctgaacatcgccgagcccgagggtcgctggctgctggagctgattaacatcttgcagagcatcgtagtgcaggagcgcagcctgagcctggccgagaaggtggcggcgatcaactactcggtgctgagcctgggcaagttttacgcgcgcaagatttacaagacgccttacgtgcccatagacaaggaggtgaagatagacagcttttacatgcgcatggcgctcaaggtgctgacgctgagcgacgacctgggcgtgtaccgcaacgaccgcatccacaaggccgtgagcacgagccggcggcgcgagctgagcgaccgcgagctgatgctgagcctgcgccgggcgctggtaggaggcgccaccggcggcgaggagtcctacttcgacatgggggcggacctgcattggcagccgagccggcgcgccttggaggccgcctacggtccagaggacttggatgaggatgaggaagaggaggaggatgcacccgttgcggggtactgacgcctccgtgatgtgtttttagatgtcccagcagcaagccccggaccccgccataagggcggcgctgcaaagccagccgtccggtctagcatcggacgactgggaggccgcgatgcaacgcatcatggccctgacgacccgcaaccccgagtcctttagacaacagccgcaggccaacagactctcggccattctggaggcggtggtcccctctcggaccaaccccacgcacgagaaggtgctggcgatcgtgaacgcgctggcggagaacaaggccatccgtcccgacgaggccgggctggtgtacaacgccctgctggagcgcgtgggccgctacaacagcacgaacgtgcagtccaacctggaccggctggtgacggacgtgcgcgaggccgtggcgcagcgcgagcggttcaagaacgagggcctgggctcgttggtggcgctgaacgccttcctggcgacgcagccggcgaacgtgccgcgcgggcaggacgattacaccaactttatcagcgcgctgcggctgatggtgaccgaggtgccccagagcgaggtgtaccagtcgggcccggactactttttccagacgagccggcagggcttgcagacggtgaacctgagccaggctttcaagaatctgcgcgggctgtggggcgtgcaggcgcccgtgggcgaccggtcgacggtgagcagcttgctgacgcccaactcgcggctgctgctgctgctgatcgcgcccttcaccgacagcggcagcgtgaaccgcaactcgtacctgggccacctgctgacgctgtatagggaggccataggccaggcgcaggtggacgagcagacattccaggagatcacgagcgtgagccgcgcgctggggcagaacgacaccgacagtctgagggccaccctgaacttcttgctgaccaatagacagcagaagatcccggcgcagtacgcactgtcggccgaggaggaaaggattctgagatatgtgcagcagagcgtagggctgttcctgatgcaggagggggccacccccagcgccgcgctggacatgaccgcgcgcaacatggaacctagcatgtacgccgccaaccggccgttcatcaataagctgatggactacctgcaccgcgcggcggccatgaacacggactactttaccaacgccatcctgaacccgcactggctcccgccgcctgggttctacacgggcgagtacgacatgcccgaccccaacgacgggttcctgtgggacgacgtggacagcgcggtgttctcgcccgcctttcaaaagcgtcaggaagcggtgcgcacgcctagcgagggcgcggtgggacggagcccctttcctagcttggggagtttgcatagcctgccgggctcggtgaacagcggcagggtgagccggccgcgcttgctgggcgaggacgagtacctgaacgactcgctgctgcagccgccgcgggtcaagaacgccatggccaataacgggatagagagtctggtggacaaactgaaccgctggaagacctacgctcaggaccatagggacgcgcccgcgccgcggcgacagcgccacgaccggcagcggggcctggtgtgggacgacgaggactcggccgacgatagcagcgtgttggacttgggcgggagcggtggtggggccaacccgttcgcgcatctgcagcccagactggggcggcggatgttttgaaatgcaaaataaaactcaccaaggccatagcgtgcgttctcttccttgttagagatgaggcgcgcggtggtgtctcctcctccctcgtacgagagcgtgatggcgcaggcgaccctggaggttccgtttgtgcctccgcggtatatggctcctacggagggcagaaacagcattcgttactcggagctggctccgcagtacgacaccactcgcgtgtacttggtggacaacaagtcggcggacatcgcttccctgaactaccaaaacgaccacagcaacttcctgaccacggtggtgcagaacaacgatttcacccccgccgaggccagcacgcagacgataaattttgacgagcggtcccggtggggcggtgatctgaagaccattctgcacaccaacatgcccaatgtgaacgagtacatgttcaccagcaagtttaaggcgcgggtgatggtggctaggaagcatccagagggggtagaagcaaccgatttaagcaaggatatcttagagtatgattggtttgagtttaccctgcccgagggcaacttttccgagaccatgaccatagacctgatgaacaacgccatcttggaaaactacttgcaagtggggcggcaaaatggcgtgctggagagcgatatcggagtcaagtttgacagcaggaatttcaagctgggctgggacccggtgaccaagctggtgatgccaggtgtctacacctacgaggccttccacccggacgtggtgctgctgccgggctgcggggtggacttcaccgagagccgcctgagcaacctcctgggcattcgcaagaagcaacctttccaagagggcttcagaatcatgtatgaggatctagtagggggcaatatcccagccctcctggatgtcaagaagtatctgaaggataaggaagaagctggcactacagatgcaaataccattaaggctcagaatgatgcagtcccaagaggagacaactttgcttcagcggcagatgccaaagcggcaggaaaagaaattgagttgaaagccattttaaaagatgattcaggcagaagctacaatgtgatcgagggaaccacggacaccctgtaccgaagttggtacctgtcctatacctacggggaccccgagaagggggtgcagacgtggacgctgctcactaccccggacgtcacctgcggcgcggagcaagtctactggtcgctgccggacctcatgcaagaccccgtcaccttccgctccacccagcaagtcagcaactaccccgtggtcggcgccgagctcatgcccttccgcgccaagagcttttacaacgacctcgccgtctactcccagctcatccgcagctacacctccctcacccacgtcttcaaccgcttccccgacaaccagatcctctgccgcccgcccgcgcccaccatcaccaccgtcagtgaaaacgtgcctgctctcacagatcacgggacgctaccgctgcgcagcagtatccgcggagtccagcgagtgaccgtcactgacgcccgtcgccgcacctgtccctacgtctacaaggccctgggcatagtcgcgccgcgcgtgctttccagtcgcaccttctaaaaaatgtctattctcatctcgcccagcaataacaccggctggggtcttactaggcccagcaccatgtacggaggagccaagaagcgctcccagcagcaccccgtccgcgtccgcggccacttccgcgctccctggggcgcatacaagcgcgggcggacttccaccgccgccgtgcgcaccaccgtcgacgacgtcatcgactcggtggtcgccgacgcgcgcaactatacccccgccccctccaccgtggacgcggtcatcgacagcgtggtggccgacgcgcgcgactatgccagacgcaagagccggcggcgacggatcgccaggcgccaccggagtacgcccgccatgcgcgccgcccgggctctgctgcgccgcgccagacgcacgggccgccgggccatgatgcgagccgcgcgccgcgctgccgctgcacccacccccgcaggcaggactcgcagacgagcggccgccgccgccgccgcggccatctctagcatgaccagacccaggcgcggaaacgtgtactgggtgcgcgactccgtcacgggcgtgcgcgtgcccgtgcgcacccgtcctcctcgtccctgatctaatgcttgtgtcctcccccgcaagcgacgatgtcaaagcgcaaaatcaaggaggagatgctccaggtcgtcgccccggagatttacggaccaccccaggcggaccagaaaccccgcaaaatcaagcgggttaaaaaaaaggatgaggtggacgagggggcagtagagtttgtgcgcgagttcgctccgcggcggcgcgtaaattggaaggggcgcagggtgcagcgcgtgttgcggcccggcacggcggtggtgttcacgcccggcgagcggtcctcggtcaggagcaagcgtagctatgacgaggtgtacggcgacgacgacatcctggaccaggcggcggagcgggcgggcgagttcgcctacgggaagcggtcgcgcgaagaggagctgatctcgctgccgctggacgaaagcaaccccacgccgagcctgaagcccgtgaccctgcagcaggtgctgccccaggcggtgctgctgccgagccgcggggtcaagcgcgagggcgagagcatgtacccgaccatgcagatcatggtgcccaagcgccggcgcgtggaggaagtgctggacagcgtgaaaatggatgtggagcccgaggtcaaggtgcgccccatcaagcaggtggcgccgggcctgggcgtgcaaaccgtggacattcagatccccaccgacatggatgtcgacaaaaaaccctcgaccagcatcgaggtgcagaccgacccctggctcccagcttctaccgccaccgcctctacatctaccgccgccacggctaccgagcctcccaggaggcgaagatggggcgccgccagccggctgatgcccaactacgtgttgcatccttccatcatcccgacgccgggctaccgcggcacccggtactacgccagccgcaggcgcccagccagcaaacgccgccgccgcaccaccacccgccgccgtctggcccccgcccgcgtgcgccgcgtgaccacgcgccggggccgctcgctcgttctgcccaccgtgcgctaccaccccagcatcctttaatccgtgtgctgtgatactgttgcagagagatggctctcacttgccgcctgcgcatccccgtcccgaattaccgaggaagatcccgccgcaggagaggcatgacaggcagcggcctgaaccgccgccggcggcgggccatgcgcaggcgcctgagtggcggctttctgcccgcgctcatccccataatcgccgcggccatcggcacgatcccgggcatagcttccgttgcgctgcaggcgtcgcagcgccgttgatgtgcgaataaagcctctttagactctgacacacctggtcctgtatatttttagaatggaagacatcaattttgcgtccctggctccgcggcacggcacgcggccgttcatgggcacctggaacgagatcggcaccagccagctgaacgggggcgccttcaattggagcagtgtctggagcgggcttaaaaatttcggctcgacgctccggacctatgggaacaaggcctggaatagtagcacggggcagttgttgagggaaaagctcaaagaccagaacttccagcagaaggtggtggacgggctggcctcgggcattaacggggtggtggacatcgcgaaccaggccgtgcagcgcgagataaacagccgtctggacccgcgcccgcccgccgccacggtggtggagatggaagatgcaactcttccgccgcccaagggcgagaagcggccgcggcccgacgcggaggagacgatcctgcaggtggacgagccgccctcgtacgaggaggccgtcaaggccggcatgcccaccacgcgcatcatcgcgccgctggccacgggtgtaatgaaacccgccacccttgacctgcctccaccacctacgcccgctccaccgaaagcagctccggttgtgcagccccctccggtggcgaccgccgtgcgccgcgtccccgcccgccgccaggcccagaactggcagagcacgctgcacagtatcgtgggcctgggagtgaaaagtctgaagcgccgccgatgctattgagagagaggaaagaggacactaaagggagagcttaacttgtatgtgccttaccgccagagaacgcgcgaagatggccaccccctcgatgatgccgcagtgggcgtacatgcacatcgccgggcaggacgcctcggagtacctgagcccgggtctggtgcagtttgcccgcgccaccgacacgtacttcagcctgggcaacaagtttaggaaccccacggtggccccgacccacgatgtgaccacggaccggtcccagcgtctgacgctgcgcttcgtgcccgtggatcgcgaggacaccacgtactcgtacaaggcgcgcttcactctggccgtgggcgacaaccgggtgctagacatggccagcacgtactttgacatccgcggcgtcctggaccgcggtcccagcttcaaaccctactcgggcacggcttacaacagcctggcccccaagggcgcccccaatcccagtcagtggactactaaagaaaagcagaccggagtaaatgcaggagacaaagaagttaccaagacatttggaattgccgccatgggaggcagtaatatttctgaaaacggtttgcagattggaactgacacaacagcagatggcacaaaaccaatatatgcagacaaaactttccagccagaacctcaagttggagaagaaaactggcaggataatgatgaatattatggaggcagggctcttaaaaaagataccaaaatgaagccatgctatggttcatttgctaaacccacaaacaaggaaggagggcaggctaaattgaaagaaacacccaatggcgctgatcctcaatatgatgtggacatggctttctttgactcaacaactataaacattccagatgtagtgttgtacactgaaaatgtagacttggaaactccagacacacatgtggtgtacaaaccaggcaaagaggatgacagttcagaagtaaacttaactcagcagtccatgcctaacagacccaactacattggcttcagagacaactttgtggggctcatgtactacaacagcactggcaacatgggtgtgctggctggtcaggcttctcagttgaatgctgtggttgacttgcaagacagaaacaccgaactgtcttaccagctcttgctagattctctgggtgacagaacaagatactttagcatgtggaactctgcggtggacagttatgatcccgatgtcaggatcattgaaaatcacggtgtggaagatgaacttccaaactactgcttccccttggacggtattcaaactaattcagcctaccaaggtgttaaactaaaggataatccaacaggaggcggagctaatggagattgggtaaaggatgataccatttcagcccataatcaaattgggaagggcaacatctttgccatggagatcaacctccaggccaacctctggaagagttttctgtactcgaacgtggccttgtacctgcccgactcctacaagtacacgccggccaacgtcacgctgcccgccaacaccaacacctacgagtacatgaacggccgcgtggtagccccctcgctggtggacgcctacatcaacatcggcgcccgctggtcgttggaccccatggacaacgtcaaccccttcaaccaccaccgcaacgcgggcctgcgctaccgctccatgcttctgggcaacggccgctacgtgcccttccacatccaagtgccccaaaagttctttgccatcaagaacctgctcctgcttcccggctcctacacctacgagtggaacttccgcaaggatgtcaacatgatcctgcagagttccctcggcaacgacctgcgcgtcgacggcgcctccgtccgcttcgacagcgtcaacctctacgccaccttcttccccatggcgcacaacaccgcctccaccctggaagccatgctgcgcaacgacaccaacgaccagtccttcaacgactacctctcggccgccaacatgctctaccccatcccggccaaggccaccaacgtgcccatctccatcccctcgcgcaactgggccgccttccgcggctggagtttcactcgtctgaagaccaaggaaactccctctctcggttcgggtttcgacccctactttgtctactcgggctccattccctacctcgacgggaccttctacctcaaccacaccttcaagaaggtctccatcatgttcgactcctcggtcagctggcccggcaacgaccggctgctcacgccgaacgagttcgagatcaagcgcagcgtcgacggggagggctacaacgtggcccaatgcaacatgaccaaggactggttcctcgtccagatgctctcccactacaacatcggctaccagggcttccacgtgcccgagggctacaaggaccgcatgtactccttcttccgcaacttccagcccatgagcaggcaggtggtcgatgaaatcaactacaaggactacaaggccgtcaccctgcccttccagcacaacaactcgggcttcaccggctacctggcccccaccatgcgtcaggggcagccctaccccgccaacttcccctacccgctcatcggctccaccgcagtcccctccgtcacccagaaaaagttcctctgcgacagggtcatgtggcgcatccccttctccagcaacttcatgtccatgggcgccctcaccgacctgggtcagaacatgctctatgccaactcggcccacgcgctcgacatgaccttcgaggtggaccccatggatgagcccaccctcctctatcttctcttcgaagttttcgacgtggtcagagtgcaccagccgcaccgcggcgtcatcgaggccgtctacctgcgcacgcccttctccgccggcaacgccaccacctaagcatgagcggctccagcgaacgagagctcgcggccatcgtgcgcgacctgggctgcgggccctactttttgggcacccacgacaagcgcttcccgggcttcctcgccggcgacaagctggcctgcgccatcgtcaacacggccggccgcgagacaggaggcgtgcactggctcgcctttggctggaacccgcgctcgcgcacctgctacatgttcgacccctttgggttctcggaccgccggctcaagcagatttacagcttcgagtacgaggccatgctgcgccgcagcgccctggcttcctcgcccgaccgctgtctcagcctcgagcagtccacccagaccgtgcaggggcccgactccgccgcctgcggacttttctgttgcatgttcttgcatgccttcgtgcactggcccgaccgacccatggacggaaaccccaccatgaacttgctgacgggggtgcccaacggcatgctacaatcgccacaggtgctgcccaccctcaggcgcaaccaggaggagctctaccgcttcctcgcgcgccactccccttactttcgatcccaccgcgccgccatcgaacacgccaccgcttttgacaaaatgaaacaactgcgtgtatgactcaaataaacagcacttttattttacacatgcactggagtatatgcaagttatttaaaagtcgaaggggttctcgcgctcatcgttgtgcgccgcgctggggagggctacgttgcggtactggtacttgggctgccacttgaactcggggatcaccagtttgggaacgggaatctcggggaaggtctcgctccacatgcgccggctcatctgcagggcgcccagcatgtccggggctgagatcttgaaatcgcagttggggccggtactctgcgcgcgcgagttgcggtacacggggttgcagcactggaacaccatcagactggggtacttcacgctggccagcacgctcttgtcgctgatctgatccttgtccaggtcctcggcgttgctcaggccgaacggggtcatcttgcacagctggcggcccaggaagggcacgctgtggggcttgtggttacactcgcagtgcacgggcatcagcatcatccccgcaccgcgctgcatattcgggtagagggccttgacgaaggccatgatctgcttgaaagcttgctgggccttggccccctcgctgaagaacaggccgcagctcttcccgctgaactggttattcccacatccggcatcctgcacgcagcagcgcgcgtcatggctggtcagttgaaccacgcttctcccccagcggttctgggtcaccttggccttgctgggctgttccttcaacgcgcgctgtccgttctcgctggtcacatccatttccaccacgtggtccttgtggatcattaccgtcccgtgcagacatttgagctggccttccacctcggtgcagccgtggtcccacaaggcgctgccggtgcactcccagttcttgtgcgcgatcccgctgtggctgaagatgtaaccttgcaacaggcggcccatgacggtgctaaagctcttctgggtggtgaaggtcagttgcagcccgcgggcctcctcgttcatccaggtctggcacatcttctggaagatctcggtctgctcgggcatgagcttgaaagcatcgcgcaggccgctgtcgacgcggtagcgttccatcagcacgttcatggcatccatgcccttctcccaggacgagaccagaggcagactcagggggttgcgcacgttcaggacaccgggggtcgcgggctccacgatgcgttttccgtccttgccttccttcaacagaaccggcggctggctgaatcccactcccacgatcacggcatcttcttcctggggcatctcttcgtcggggtctaccttggtcacatgtttggtcttcctggcttgcttctttggcagttttggagggctgtctacggggaccacgtcctcctcggaagacccggagcccacccgctggtactttcggcgcttggtgggcagaggaggtggcggcgaggggctcctctcctgctccggcggatagcgcgccgacccgtggccccggggcggagtggcctctcggtccatgaaccggcgcacgtcctgactgccgccggccattgtttcctaggggaagatggagccgcgtaagcaggagcaggaggaggacttaaccacccacgagcaacccaaaatcgagcaggacctgggcttggaagagccggctcgtctagaacccccacaggatgaacaggagcacgagcaagacgcaggccaggaggagaccgacgctgggctcgagcatggctacctgggaggaggagatgtgctgctgaaacacttgcagcgccagtccctcatcctccgggacgccctggccgaccggagcgaaacccccctcagcgtcgaggagctgtgtcgggcctacgagctcaacctcttctcgccgcgcgtgccccccaaacgccagcccaacggcacctgcgagcccaacccgcgtctcaacttctaccccgtcttcgcggtccccgaggccctcgtcacctatcacatctttttcaagaaccaaaagatccccgtctcctgccgcgccaaccgcacccgcgccgacgcgctcctcgctctggggcccggcgcgcgcatacctgatatcgcttccctggaagaggtgcccaagatcttcgaagggctcggtcgggacgagacgcgcgcggcgaacgctctgaaagaaacagcagaggaagagggtcacactagcgccctggtagagttggaaggcgacaatgccaggctggccgtgctcaagcgcagcgtcgagctcacccatttcgcctaccccgccgtcaacctcccgcccaaggtcatgcgtcgcatcatggatcagctcatcatgccccacatcgaggccctcgatgaaagtcaggagcagcgccccgaggacgcccaaccggtggtcagcgacgagcagctcgcgcgctggctcgggacccgcgacccccaggccctggagcagcggcgcaagctcatgctggccgtggtcctggtcaccctcgagctggaatgcatgcgccgcttctttagcgaccccgagaccctgcgcaaggtcgaggagaccctgcactacactttcagacacggtttcgtcaggcaggcctgcaagatctccaacgtggagctgaccaacctggtctcctgcctggggatcctgcacgagaaccgcctggggcagaccgtgctccactcgaccctgaagggcgaggcgcggagggactacgtccgcgactgcgtctttctctttctctgccacacctggcaagcggccatgggcgtgtggcagcagtgtctcgaggacgagaacctgaaggagctggacaagcttcttgctagaaacctcaaaaagctgtggacgggcttcgacgagcggaccaccgctgccgacctggccgagatcgttttccccgagcgcctgaggcagacgctgaaaggcggcctgcccgacttcatgagccagagcatgttgcaaaactaccgcactttcattctcgagcgatctgggatgctgcccgccacctgcaacgccttcccctccgactttgtcccgctgagctaccgcgagtgtcccccgccgctgtggagccactgctacctcttgcagctggccaactacatcgcctaccactcggacgtgatcgaggacgtgagcggcgaggggctgctcgagtgccactgccgctgcaacctgtgctccccgcaccgctccctggtctgcaacccccagctcctgagcgagacccaggtcatcggtaccttcgagctgcaaggtccgcaggagtccaccgctccgctgaaactcacgccggggttgtggacttccgcgtacctgcgcaaatttgtacccgaggactaccacgcccacgagataaagttcttcgaggaccaatcgcgcccgcagcacgcggatctcacggcctgcgtcatcacccagggcgcgatcctcgcccaattgcacgccatccaaaaatcccgccaagagtttcttctgaaaaagggtagaggggtctacctggacccccagacgggcgaggtgctcaacccgggtctcccccagcatgccgaggaagaagccgctagtggaggaggagatggaagaagaatgggacagccaggcagaggaggaagaatgggaggaggagagtacagaggaggaagaattggaagaggtggaagaggagcaggcaacagagcagcccgtcgccgcaccatccgcgccggcagccccggcggtcacggatacaacctccgcagcgcctccggtcaagcctcctcgtagatgggatcgagtgaagggtgacggtaagcacgagcggcagggctaccgatcatggagagcccacaaagccgcgatcatcgcctgcttgcaagactgcggggggaacatcgctttcgcccgccgctacctgctcttccaccgcggggtgaacatcccccgcaacgtgttgcattactaccgtcaccttcacagctaagaaaaagccagtaagaggagtcgccggaggaggaggcctgaggatcgcggcgaacgagccctcgaccaccagggagctgaggaaccggatcttccccactctttatgccatttttcagcagagtcgaggtcagcagcaagagctcaaagtaaaaaatcggtctctgcgctcgctcacccgcagttgcttgtaccacaaaaacgaagatcagctgcagcgcactctcgaagacgccgaggctctgttccacaagtactgcgcgctcactcttaaagactaaggcgcgcccacccggaaaaaaggcgggaattacctcatcgcaaccaccatgagcaaggagattcccacaccttacatgtggagctatcagccccagatgggcctggccgcgggcgcctcccaagactactccacccgcatgaactggctcagtgccgggccctcgatgatctcacgggtcaacggggtccgtaaccatcgaaaccagatattgttggagcaggcggcggtcacctccacgcccagggcaaagctcaacccgcgtaattggccctccaccctggtgtatcaggaaatccccgggccgactaccgtactacttccgcgtgacgcactggccgaagtccgcatgactaactcaggtgtccagctggccggcggcgcttcccggtgcccgctccgcccacaatcgggtataaaaaccctggtgatccgaggcagaggcacacagctcaacgacgagttggtgagctcttcgatcggtctgcgaccggacggagtgttccaaatagccggagccgggagatcctccttcactcccaaccaggcctacctgaccttgcagagcagctcttcggagcctcgctccggaggcatcggaaccctccagttcgtggaggagtttgtgccctcggtctacttcaaccccttctcgggctcgccaggcctctacccggacgagttcatcccgaacttcgacgcagtaagagaagcggtggacggctacgactgaatgtcctatggtgactcggctgagctcgctcggttgaggcatctggaccactgccgccgcctgcgctgcttcgcccgggagagctgcggcctcatctactttgagctgcccgaggagcaccccaacggccctgcacacggagtgcggatcaccgtagagggcaccaccgagtctcacctggtcaggttcttcagccagcaacccttcctggtcgagcgggaccggggcgccaccacctacaccgtctactgcatctgtcctaccccgaagttgcatgagaatttttgctgtactctttgtggtgagtttaataaaagctaaactcttacaatactctggaccttgtcgtcgtcaactcaacgagaccgtctacctcaccaaccagactgaggtaaaactcaactgcagaccagggggcaaatatatcatctggctctttgagaacacttccttcgcagtctccaacacccactgcaacgacggtattgaaatacccaacaaccttaccagtggactaacttacaccaccagaaagactaagctagtactctacaatccttttgtagagggaacctaccactgcaagagcggatcttgctaccacactttcactttggtgaacgttaccggcagcagcacagccgctcctgaaacaactaacctttcttctgatactaacaaacctcgtgtcggaggtgagctttgggttccctctctaacagagggtgggagtcatattgaagtggtcgggtatttgattttaggggtggtcctgggtgggtgcatagcggtgctatatcaccttccttgctgggtcgaaatcagggtctttatctgctgggtcagacattgtggggaggaaccatgaaggggctcttgctgattatcctttccctggtggggggtttactggcctgccacgaacagccacgatgtaacattaccacaggcaatgagaggagtgtgatatgtacagtaatcataagatgcgagcatgaatgtcctctcaacatcacattcaagaataagaccatgggaaatgtatgggtgggtgattgggaaccaggagatgagcagaactacacggtcactgtccatggtagcgatggaaaacacactttcggtttcaaattcatttttgaagtcatgtgtgatatcacactgcatgtggctagacttcatggcttgtggccccctaccaaggagaacatggttgggttttctttggcttttgtgatcatggcctgcttgatgtcaggtctgctggtaggggctctagtgtggttcctgaagcgcaagcccaggtacggaaatgaggagaaggaaaaattgctataaatctttttctttttcgcagaaccatgaatactttgaccagtgtcgtgctgctctctcttcttgtggtttttagtcagggacaaatagaacatgaaaaacagagtgttcagtggggaaagaacataacgcttgtgggtcctaacgataagcctgttgaatggcatgggcctagagatcagctttgtaagggaaaacaaatttttcacccagaattcaatcacacatgtaatgaacaaaacctcacactgctgtttgtgaacaacactttccagggaaaatattatggctttagaaatgatggtaaaggtatgaaacaaattgaactaacagtagtcccacctcctgcctcaacacgcaaacctttgtcaaagccaaaacaagtcaatgtccaatatggacataatgtaacattagaaggtcctccaggaatacctattgactggcttggaccaactaatcagctttgtaaaggaaaacaaattttacatccagaaataaaccacacctgcaatgttcaaaatctaacactgctatttgtaaactacactcatcgcggagcgtattttggctttaacaaagacggaactgataggcaacactatgaagttactattctagatggcttcagagatgcagggcagacaaaagatgagacagacagtcataaaacaaaaggaaaaacttcttcaaaacagaaaaaaacacaaaaaaataactctcatagaaatgatgatgttaaagagttagattttccaagtggatctaatcaaactttaattggtcctcctggttcaaaagttgattggtacacaacaaaaaatggtgactttacaaaattgtgcgatggattgaacggtccaaagaatctgtgtaattatcagaacttgacattgcgaaatgtaagcagacaggatgaaggaacttattttgggtctaatgaacagtcaaagcattacagagttactgtctatacaaaacctagaaatcaaactaaaagaattcagccatatactactaagggaactaccaaaggaactacaaaattaacctcaggtaatcacagctttgaattgcaactggcagatgatcaatctaatcaacaggatcaacaaattccatcaactaccgtggcaatcgtggtgggtgtgattgcgggcttcataactctgatcattgtcattctgtgctacatctgctgccgcaagcgtcccagggcttacaataatatggtagacccactactcagcttctcttactgagactcagtaactttcatttcagaaccatgaaggctttaacagcttttggtctgatcttaatcacactaagctacactgctgcagctgcttgctattataatcttaatgtaaccagaggagaaaatattacactctcaggagcaggaattaatactacatggacagcttatcataatagtggaaatggaggaaaacatggatggttgccaatctgcacatggggcgatgggcgctatctgtgcaatggcaacagcagtactatttctaatcttacatttgtagcaagcagaaattcttctgacagaaattttaaggcagagagttatactaataatgatgattatgaagttgtaaaatcatgttattataatgttaaaatcattgagcttccaaccactagagcacccaccacagttaggtcaactacacagtcctctactaaagagacaacacagcctaccactgtgcccactacacaaccaaccaccacagccagtacaactattgagaccactactcacactacacacctagacacaacagtacagaatagtactgtgttggttaggtttttgttgagggaggaaagtactactgaacagacagaggctacctcaagtgccttcagcagcactgcaaatttaacttcgcttgcttcaataaatgagaccctcgtgccgttgatgctggaacaagatctaagaggtttggatatgcaaattacttttctggttgtatgtgggatctttattcttgtggttcttctgtactttgtctgctgtaaagccagagagaaatctaggcggcccatctacaggccagtaatcggggaacctcagccgctgcaagtggaagggggtctaaggaatcttctcttctctttttcagtatggtgatcagccatgattcctaggttcttcctatttaacatcctcttctgtctcttcaacatctgcgctgcctttgcggccgtctcgcacgcctcgcccgactgtctcgggcccttccccacctacctcctctttgccctgctcacctgcacctgcgtctgcagcattgtctgtctggtcgtcaccttcctgcagctcatcgactggtgctgcgcgcgctacaattacctacaccacagtcccgaatacagggacgagaacgtagccagaatcttaaggctcatatgaccatgcagactctgctcatactgctatccctgctcctatcccctgccctcgctgatgatgattactctaagtgcaaatttgtgaagctatggaatttcttagactgctatgatgctaaaatggatatgccatcctattacttggtgattgtggggatagtcatggtctgctcctgcactttctttgccatcatgatctacccctgttttgatctcggctggaactctgttgaggcattcacatacacactagaaagcagttcactagcctccacgccaccacccacacctcctccccgcagaaatcagtttcccctgattcagtacttagaagagccccctccccgacccccttccactgttagctactttcacataactggcggcgatgactgaccacctggacctcgagatggacggccaggcctccgagcagcgcatcctgcaactgcgcgtccgtcagcagcaggagcgggccgccaaggagctcctcgatgccatcaacatccaccagtgcaagaagggcatcttctgcctggtcaaacaggcaaagatcacctacgagctcgtgtccggcggcaagcagcatcgcctcgcctatgagctgccccagcagaagcagaagttcacctgcatggtgggcatcaaccccatagtcatcacccagcagtcgggcgaggccagcggctgcatccactgctcctgcgaaagccccgagtgcatctactccctactcaagaccctttgcggactccgcgaccttctccccatgaactgatgttgattaaagcccagaaaccaatcaaaccccttcccctttgccccaaataaacaatcattggaaataatcattcaataaagatcacttacttgaaatctgaaagtatgtctctggtgtagttgttcagcagcacctcggtaccctcctcccagctctgatactccagtccccggcgggcggcgaacttcctccacaccttgaaagggatgtcaaattcctggtccacaattttcattgtcttccctctcagatggcaaagaggctccgggtggaagatgacttcaaccccgtctacccctatgactacgcgcggaatcagaatatccccttcctcactcccccctttgtctcctccgatggattcaaaaacttcccccctggggtcctgtcactcaaactggctgacccaatcaccatagccaatggtgatgtctcactcaaggtgggagggggacttactttgcaagaaggaagtctgactgtagaccctaaggctcccttgcaacttgcaaatgataaaaaacttgagcttgtttatgatgatccatttgaggttagcaccaataaacttagtttaaaagtaggacatggattaaaagtattagatgacaaaagtgctggagggttgaaagatttaattggcaaacttgtggttttaacaggaaaaggaataggtattgaaaatttgcaaaacgacgatggtagtagcagaggggttggtataaatgtaagactcggcacagatggaggtctgtcctttgacaggaaaggtgaattagtagcttggaacagaaaagatgacaggcgaaccctttggacaacacctgatccatcgcccaattgtaaagccgaaacagaaaaggactcaaagcttactttggttctaacaaaatgcggaagtcaaatcttagctactgtgtctattattgttcttaagggtaaatatgaatttgttaaaaaagaaacagagcctaagtcctttgatgttaaattgctgtttgacagcaaaggagtgcttctaccaacttcaaatctttccaaagaatattggaactatagaagttatgataacaacataggaactccttatgaaaatgcagttccatttatgccaaatctaaaagcttatccaaaaccaactaaaactgcttcagataaagcagaaaataaaataagcagtgctaaaaacaaaattgtaagcaacttctactttggagggcaagcatatcaacctgggacaataataattaagtttaatgaggaaatagatgagacatgtgcatactctatcacctttaactttggttggggcaaggtatatgacaatccatttccatttgataccacctcttttaccttctcttatattgcccaagaaaatgaagacaaagactaataaaatgttttgaactggatttatgaatctttattgatttttacaccagcacgggtagtcagtctcccaccaccagcccatttcacagtgtacacgattctttcagcacgggtggccttaaataggggaatattattattggaacgggaactagatttagtgtctataatccacacagtttcctggcgagccaaacgggggtcggtgattgagatgaagccgtcctctgagaagtcatccaagcgggcctcacagtccaaggtcacagtctggtggaacgagaagaacgcacagattcatactcggaaaacaggatgggtctgtgcctctccatcagcgccctcaacagtctttgccgccggggctcggtgcgactgctgcagatgggatcgggatcacaagtctctctgactatgatccccacagccttcagcatcagtctcctggtgcgtcgggcacagcaccgcatcctgatctctgccatgttctcacagtaagtgcagcacataatcaccatgttatttagcagcccataattcagggtgctccagccaaagctcatgttggggatgatggaacccacgtgaccatcgtaccagatgcggcagtatatcaggtgcctgcccctcataaacacactgcccatatacatgatctctttgggcatgtctctgttcacaatctgacggtaccatgggaaacgctggttgaacatgcacccgtaaatgactctcctgaaccacacggccagcagggtgcctcccgcccgacactgcagggagcccggggatgaacagtggcaatgcaggatccagcgctcgtacccgctcaccatctgagctctcaccaagtccagggtagcggggcacaggcacactgacatacatctttttaaaatttttatttcctctggggtcaggatcatatcccatgggactggaaactcttggagcagggtaaagccagcagcacatggtaatccacggacagaacttacattatgataatctgcatgatcacaatcgggcaacaggggatgttgttcagtcagtgaagccctggtctcctcatcagatcgtggtaaacgggccctgcgatatggatgatggcgcagcgagctggattgaatctcggtttgcattgtagtggattctcttgcgtaccttgtcgtacttctgccagcagaaatgggcccttgaacagcagatacccctcctgcggccgtcctttcgctgctgccgctcagtcatccaactgaagtacatccattctcgaagattctggagaagttcctctgcatctgatgaaacaaaaaacccgtccatgcgaattcccctcatcacatcagccaggactctgtaggccatccccatccagttaatgctgccttgtctatcattcagagggggcggtggcaggattggaagaaccatttttattccaagcggtctcgaaggacgataaagtgcaaatcacgcaggtgacagcgttccccgccgctgtgctggtggaaacagacagccagatcaaaacccactctattttcaaggtgctcgaccgtggcttcgagcagtggctctacgcgtacatccagcataagaatcacattaaaggccggccctccatcgatttcatcaatcatcaggttacactcgttcaccatccccaggtaattctcatttttccagccttgaattatctctacaaattgttggtgtaagtccactccgcacatgtggaaaagctcccacagcgccccctccactttcataatcaggcagaccttcatattagaaacagatcctgctgctccaccacctgcagcgtgttcaaaatagcaagatttaatgaggttctgccctctgccctcagctcgcgcctcagcgtcagctgtaaaaagtcactcaagtcctcagacaccacagctgccaactctgagcctgggctaagcgtgggactggcaagcgtgagggaatatttcagtgctccataattagcccccaaaaactgcatgctggaataagctctctttgtgtctccggtgatgccttccaataggtgagtaataaagcgaggtagctcttttctaatcattgcagtaatggaaaagtcctctaaatagttgactaaaacaccaggtaccacaatgtggtagctgacaccgtggcgctcaagcatggttagtagagatgaaagtctgaaaaacagaaatcatgcactaaaccagagtggccagtctcactgaaggaaaaatcactctctgaagcaacagtgtgcccactgggtggccctcgcggacatacaaaaatcggtccgtgtggttaaagagcagcacagctagctcctgtcttctcccggcaaaaatcacatcggactgggttagtatgccgctggtatggtagtcattcaaggccataaatctgccttggtagccattaggaatcagcacgctcactctcaggtgaagcaaaaccaccccatgcggaggaatgtggaaagattctgggcaaaagaaggtatatctattgctagtcccttcctggacgggagcgatccctccaggactatctatgaaagcatacagagattcagccatagctcagcccgcttaccagtagacagagagcacagcagtacaagcgccaacagcagcgactgactacccactaacccagctccctatttaaaggcaccttacactgacgtaatgaccaaaggtctaaaaaccccgccaaaaaaacacacacgccctgggtgtttttcgcgaaaacacttccgcgttctcacttcctcgtatcgatttcgtgactcaacttccgggttcccacgttacgtcacttctgcccttacatgtaactcagccgtatggcgccatattgcccacgtccaaaatggcttccatgtccagccacgcctccgcgacgaccgtcggccgtgcgtcgtgacgtcatttgcatcaccgcttctcgttcaatgagcgttggctccgcccaaaaaccgttaagattcaaaagctcatttgcatattaacttttgtttactttgtggggtatattattgatgatg

SEQ ID NO: 22 - DNA, 35717 bp, Adenovirus D17
  MISC_FEATURE (1)..(35717): Complete Genome
catcatcaataatataccccacaaagtaaacaaaagttaatatgcaaatgaggttttaaatttagggcggggctactgctgattggccgagaaacgttgatgcaaatgacgtcacgacgcacggctaacggtcgccgcggaggcgtggcctagcccggaagcaagtcgcggggctgatgacgtataaaaaagcggactttaaacccggaaacggccgattttcccgcggccacgcccggatatgaggtaattctgggcggatgcaagtgaaattaggtcattttggcgcgaaaactgaatgaggaagtgaaaagtgaaaaataccggtcccgcccagggcggaatatttaccgagggccgagagactttgaccgattacgtgtgggtttcgattgcggtgttttttcgcgaatttccgcgtccgtgtcaaagtccggtgtttatgtcacagatcagctgatccacagggtatttaaaccagtcgagcccgtcaagaggccactcttgagtgccagcgagtagagatttctctgagctccgctcccagagtgtgagaaaaatgagacacctgcgcctcctgcctggaactgtgcccttggacatggccgcattattgctggatgactttgtgagtacagtattggaggatgaactgcaaccaactccgttcgagctgggacccacacttcaggacctctatgatttggaggtagatgcccaggaggacgacccgaacgaagatgctgtgaatttaatatttccagaatctctgattcttcaggctgacatagccagcgaagctctacctactccacttcatactccaactctgtcacccatacctgaattggaagaggaggacgagttagacctccggtgttatgaggaaggttttcctcccagcgattcagaggacgaacagggtgagcagagcatggctctaatctcagactatgcttgtgtggttgtggaagagcattttgtgttggacaatcctgaggtgcccgggcaaggctgtaaatcctgccagtaccaccgggataagaccggagacacgaacgcctcctgtgctctgtgttacatgaaaaagaacttcagctttatttacagtaagtggagtgaatgtgagagaggctgagtgcttaagacataactgggtgatgcttcaacagctgtgctaagtgtggtttattttgtttctaggtccggtgtcagaggatgagtcatcaccctcagaagaagaccacccgtgtccccctgagctgtcaggcgaaacgcccctgcaagtgcacagacccaccccagtcagacccagtggcgagaggcgagcagctgttgaaaaaattgaggacttgttacatgacatgggtggggatgaacctttggacctgagcttgaaacgtcccaggaactaggcgcagctgcgcttagtcatgtgtaaataaagttgtacaataaaaattatatgtgacgcatgcaaggtgtggtttatgactcatgggcggggcttagttctatataagtggcaacacctgggcactggagcacagaccttcagggagttcctgatggatgtgtggactatccttgcagactttagcaagacacgccggcttgtagaggatagttcagacgggtgctccgggttctggagacactggtttggaactcctctatctcgcctggtgtacacagttaaaaaggattataacgaggaatttgaaaatctttttgctgattgctctggcctgctagattctctgaatctcggccaccagtcccttttccaggaaagggtactccacagccttgatttttccagcccagggcgcactacagccggggttgcttttgtggtttttctggttgacaaatggagccagaacacccaactgagcaggggctacattctggacttcgcagccatgcacctgtggagggcatgggtcaggcagcggggacagagaatcttgaactactggcttctacagccagcagctccgggtcttcttcgtctacacagacaaacatccatgttggaggaagaaatgaggcaggccatggacgagaacccgaggagcggtctggaccctccgtcggaagaggagttggattgaatcaggtatccagcctgtacccagagcttagcaaggtgctgacatccatggccaggggagtgaagagggagaggagcgatgggggcaataccgggatgatgaccgagctgacggccagtctgatgaatcgcaagcgcccagagcgccttacctggtacgagctacagcaggagtgcagggatgagttgggcctgatgcaggataaatatggcctggagcagataaaaacccattggttgaacccagatgaggattgggaggaggctattaagaagtatgccaagatagccctgcgcccagattgcaagtacatagtgaccaagaccgtgaatatcagacatgcctgctacatctcggggaacggggcagaggtggtcattgataccctggacaaggccgcctttaggtgttgcatgatgggaatgagagccggagtgatgaatatgaattccatgatctttatgaacatgaagttcaatggagagaagtttaatggggtgctgttcatggccaacagccacatgaccctgcatggctgcgactttttcggctttaacaatatgtgcgcagaggtctggggcgcttccaagatcaggggatgtaagttttatggctgctggatgggcgtggtcggaagacccaagagcgagatgtctgtgaagcagtgtgtgtttgagaaatgctacctgggagtctctaccgagggcaatgctagagtgaggcactgctcttccctggagacgggctgcttctgcctggtgaagggcacagcctctctgaagcataatatggtgaagggctgcacggatgagcgcatgtacaacatgctgacctgcgactcgggggtctgtcatatcctgaagaacatccatgtgacctcccaccccagaaagaagtggccagtgtttgagaataacatgctgatcaagtgccacatgcacctgggcgccagaaggggcaccttccagccgtaccagtgcaactttagccagaccaagctgctgttggagaacgatgccttctccagggtgaacctgaacggcatctttgacatggatgtctcggtgtacaagatcctgagatacgatgagaccaagtccagggtgcgcgcttgcgagtgcgggggcagacacaccaggatgcagccagtggccctggatgtgaccgaggagctgagaccagaccacctggtgatggcctgtaccgggaccgagttcagctccagtggggaggacacagattagaggtaggtttgagtagtgggcgtggctaaggtgactataaaggcgggtgtcttacgagggtctttttgcttttctgcagacatcatgaacgggaccggcggggccttcgaaggggggctttttagcccttatttgacaacccgcctgccaggatgggccggagttcgtcagaatgtgatgggatcgacggtggacgggcgcccagtgcttccagcaaattcctcgaccatgacctacgcgaccgtggggaactcgtcgcttgacagcaccgccgcagccgcggcagccgcagccgccatgacagcgacgagactggcctcgagctacatgcccagcagcagcagtagcccctctgtgcccagttccatcatcgccgaggagaaactgctggccctgctggccgagctggaagccctgagccgccagctggccgccctgacccagcaggtgtccgagctccgcgaacagcagcagcaaaataaatgattcaataaacacatattctgattcaaacagcaaagcatctttattatttattttttcgcgcgcggtaggccctggtccacctctcccgatcattgagagtgcggtggattttttccaagacccggtagaggtgggattggatgttgaggtacatgggcatgagcccgtcccgggggtggaggtagcaccactgcatggcctcgtgctctggggtcgtgttgtagatgatccagtcatagcaggggcgctgggcgtggtgctggatgatgtccttgaggaggagactgatggccacggggagccccttggtgtaggtgttggcaaagcggttgagctgggagggatgcatgcggggggagatgatgtgcagtttggcctggatcttgaggttggcgatgttgccacccagatcccgccgggggttcatgttgtgcaggaccaccaggacggtgtagcccgtgcacttggggaacttatcatgcaacttggaagggaatgcgtggaagaatttggagacgcccttgtgcccgcccaggttttccatgcactcatccatgatgatggcgatgggcccgtgggctgcggctttggcaaagacgtttctggggtcagagacatcataattatgctcctgggtgagatcatcataagacattttaatgaattttgggcggagggtgccagattgggggacgatggttccctcgggccccggggcgaagttcccctcgcagatctgcatctcccaggctttcatctcggagggggggatcatgtccacctgcggggcgatgaaaaaaacggtttccggggcgggggtgatgagctgcgaggagagcaggtttctcaacagctgggacttgccgcacccggtcgggccgtagatgaccccgatgacgggttgcaggtggtagttcaaggacatgcagctgccgtcgtcccggaggaggggggccacctcgttgagcatgtctctaacttggaggttttcccggacgagctcgccgaggaggcggtccccgcccagcgagaggagctcttgcagggaagcaaagtttttcaggggcttgagtccgtcggccatgggcatcttggcgagggtctgcgagaggagttcgagacggtcccagagctcggtgacgtgctctacggcatctcgatccagcagacttcctcgtttcgggggttgggacgactgcgactgtagggcacgagacgatgggcgtccagcgcggccagcgtcatgtccttccagggtctcagggtccgcgtgagggtggtctccgtcacggtgaaggggtgggcccctggctgggcgcttgcaagggtgcgcttgagactcatcctgctggtgctgaaacgggcacggtcttcgccctgcgcgtcggcgagatagcagttgaccatgagctcgtagttgagggcctcggcggcgtggcccttggcgcggagcttgcccttggaagagcgtccgcaggcgggacagaggagggattgcagggcgtagagcttgggcgcaagaaagaccgactcgggagcaaaagcgtccgctccgcagtgggcgcagacggtctcgcactcgacgagccaggtgagctcgggctgctcggggtcaaaaaccagttttcccccgttctttttgatgcgcttcttacctcgcgtctccatgagtctgtgtccgcgctcggtgacaaacaggctgtcggtgtccccgtagacggacttgattggcctgtcctgcaggggcgtcccgcggtcctcctcgtagagaaactcggaccactctgagacaaaggcgcgcgtccacgccaagacaaaggaggccacgtgcgaggggtagcggtcgttgtccaccagggggtccaccttttccaccgtgtgcagacacatgtccccctcctccgcatccaagaaggtgattggcttgtaggtgtaggccacgtgaccaggggtccccgacgggggggtataaaagggggcgggtctgtgctcgtcctcactctcttccgcgtcgctgtccacgagcgccagctgttggggtaggtattccctctcgagagcgggcatgacctcggcactcaggttgtcagtttctagaaacgaggaggatttgatgttggcttgccctgccgcaatgctttttaggagactttcatccatctggtcagaaaagactatttttttattgtcaagcttggtggcaaaggagccatagagggcgttggagagaagcttggcgatggatctcatggtctgatttttgtcacggtcggcgcgctccttggccgcgatgttgagctggacatattcgcgcgcgacacacttccattcgggaaagacggtggtgcgctcgtcgggcacgatcctgacgcgccagccgcggttatgcagggtgaccaggtccacgctggtggccacctcgccgcgcaggggctcgttagtccagcagagtctgccgcccttgcgcgagcagaacgggggcagcacatcaagcagatgctcgtcaggggggtccgcatcgatggtgaagatgccgggacagagtttcttgtcaaaatagtctatttttgaggatgcatcatccaaggccatctgccactcgcgggcggccattgctcgctcgtaggggttgaggggcggaccccagggcatgggatgcgtgagggcggaggcgtacatgccgcaaatgtcgtagacatagatgggctccgagaggatgccgatgtaggtgggataacagcgccccccgcggatgctggcgcgcacgtagtcatacaactcgtgcgagggggccaagaaggcggggccgagattggtgcgctggggctgctcggcgcggaagacaatctggcgaaagatggcgtgcgagttggaggagatggtgggccgttggaagatgttaaagtgggcgtggggcaagcggaccgagtcgcggatgaagtgcgcgtaggagtcttgcagcttggcgacgagctcggcggtgacgaggacgtccatggcgcagtagtccagcgtttcgcggatgatgtcataacccgcctctcctttcttctcccacagctcgcggttgagggcgtattcctcgtcatccttccagtactcccggagcgggaatcctcgatcgtccgcacggtaagagcccagcatgtagaaatggttcacggccttgtagggacagcagcccttctccacggggagggcgtaagcttgtgcggccttgcggagcgaggtgtgcgtcagggcgaaggtgtccctgaccatgactttcaagaactggtacttgaaatccgagtcgtcgcagccgccgtgctcccatagctcgaaatcggtgcgcttcttcgagagggggttaggcagagcgaaagtgacgtcattgaagagaatcttgcctgctcgcggcatgaaattgcgggtgatgcggaaagggcccgggacggaggctcggttgttgatgacctgggcggcgaggacgatctcgtcgaagccgttgatgttgtgcccgacgatgtagagttccatgaatcgcgggcggcctttgatgtgcggcagctttttgagctcctcgtaggtgaggtcctcggggcattgcaggccgtgctgctcgagcgcccattcctggagatgtgggttggcttgcatgaaggaagcccagagctcgcgggccatgagggtctggagctcgtcgcgaaagaggcggaactgctggcccacggccatcttttcgggtgtgacgcagtagaaggtgagggggtcccgctcccagcgatcccagcgtaagcgcgcggctagatcgcgagcaagggcgaccagctctgggtcccccgagaatttcatgaccagcatgaaggggacgagctgcttgccgaaggaccccatccaggtgtaggtttctacatcgtaggtgacaaagagccgctccgtgcgaggatgagagccgattgggaagaactggatttcctgccaccagttggacgagtggctgttgatgtgatgaaagtagaaatcccgccggcgaaccgagcactcgtgctgatgcttgtaaaagcgtccgcagtactcgcagcgctgcacgggctgtacctcatccacgagatacacagcgcgtcccttgaggaggaacttcaggagtggcggccctggctggtggttttcatgttcgcctgcgtgggactcaccctggggctcctcgaggacggagaggctgacgagcccgcgcgggagccaggtccagatctcggcgcggcgggggcggagagcgaagacgagggcgcgcagttgggagctgtccatggtgtcgcggagatccaggtccgggggcagggttctgaggttgacctcgtagaggcgggtgagggcgtgcttgagatgcagatggtacttgatttctacgggtgagttggtggccgtgtccacgcattgcatgagcccgtagctgcgcggggccacgaccgtgccgcggtgcgcttttagaagcggtgtcgcggacgcgctcccggcggcagcggcggttccggccccgcgggcaggggcggcagaggcacgtcggcgtggcgctcgggcaggtcccggtgttgcgccctgagagcgctggcgtgcgcgacgacgcggcggttgacatcctggatctgccgcctctgcgtgaagaccactggccccgtgactttgaacctgaaagacagttcaacagaatcaatctcggcgtcattgacggcggcctgacgcaggatctcttgcacgtcgcccgagttgtcctggtaggcgatctcggacatgaactgctcgatctcctcctcctggagatcgccgcgacccgcgcgctccacggtggcggcgaggtcattcgagatgcgacccatgagctgcgagaaggcgcccaggccgctctcgttccagacgcggctgtagaccacgtccccgtcggcgtcgcgcgcgcgcatgaccacctgcgcgaggttgagctccacgtgccgcgcgaagacggcgtagttgcgcaggcgctggaagaggtagttgagggtggtggcgatgtgctcggtgacgaagaagtacatgatccagcggcgcaggggcatctcgctgatgtcgccgatggcctccagcctttccatggcctcgtagaaatccacggcgaagttgaaaaactgggcgttgcgggccgagaccgtgagctcgtcttccaggagcctgatgagctcggcgatggtggcgcgcacctcgcgctcgaaatccccgggggcctcgtcctcttcctcttcttccatgacaacctcttctatttcttcctctgggggcggtggtggtggcggggcccgacgacgacggcgacgcaccgggagacggtcgacgaagcgctcgatcatctccccgcggcggcgacgcatggtttcggtgacggcgcgaccccgttcgcgaggacgcagcgtgaagacgccgccggtcatctcccggtaatggggcgggtccccgttgggcagcgagagggcgctgacgatgcatcttatcaattgcggtgtaggggacgtgagcgcgtcgagatcgaccggatcggagaatctttcgaggaaagcgtctagccaatcgcagtcgcaaggtaagctcaaacacgtagcagccctgtggacgctgttagaattgcggttgctaatgatgtaattgaagtaggcgtttttgaggcggcggatggtggcgaggaggaccaggtccttgggtcccgcttgctggatgcggagccgctcggccatgccccaggcctggccctgacaccggcttaggttcttgtagtagtcatgcatgagcctctcgatgtcatcactggcggaggcggagtcttccatgcgggtgaccccgacgcccctgagcggctgcacgagcgccaggtcggcgacgacgcgctcggcgaggatggcctgttgcacgcgggtgagggtgtcctggaagtcgtccatgtcgacgaagcggtggtaggcccctgtgttgatggtgtaagtgcagttggccatgagcgaccagttgacggtctgcaggccgggctgcacgacctcggagtacctgagccgcgagaaggcgcgcgagtcgaagacgtagtcgttgcaggtgcgcacaaggtactggtatccgactaggaagtgcggcggcggctggcggtagagcggccagcgctgggtggccggcgcgcccggggccaggtcctcgagcatgaggcggtggtagccgtagaggtagcgggacatccaggtgatgccggcagcggtggtggaggcgcgcgggaactcgcggacgcggttccagatgttgcgcagcggcaggaaatagtccatggtcggcacggtctggccggtgagacgcgcgcagtcattgacgctctagaggcaaaaacgaaagcggttgagcgggctcttcctccgtagcctggcggaacgcaaacgggttaggccgcgcgtgtaccccggttcgagtcccctcgaatcaggctggagccgcgactaacgtggtattggcactcccgtctcgacccgagcccgatagccgccaggatacggcggagagccctttttgccggccgaggggagtcgctagacttgaaagcggccgaaaaccccgccgggtagtggctcgcgcccgtagtctggagaagcatcgccagggttgagtcgcggcagaacccggttcgcggacggccgcggcgagcgggacttggtcaccccgccgatttaaagacccacagccagccgacttctccagttacgggagcgagcccccttttttctttttgccagatgcatcccgtcctgcgccaaatgcgtcccacccccccggcgaccaccgcgaccgcggccgtagcaggcgccggcgctagccagccacagccacagacagagatggacttggaagagggcgaagggctggcgagactgggggcgccttccccggagcgacacccccgcgtgcagctgcagaaggacgtgcgcccggcgtacgtgcctgcgcaaaacctgttcagggaccgcagcggggaggagcccgaggagatgcgcgactgccggtttcgggcgggcagggagctgcgcgagggcctggaccgccagcgcgtgctgcgcgacgaggatttcgagccgaacgagcagacggggatcagccccgcgcgcgcgcacgtggcggcggccaacctggtgacggcctacgagcagacggtgaagcaggagcgcaacttccaaaagagtttcaacaaccatgtgcgcaccctgatcgcgcgcgaggaggtggccctgggcctgatgcacctgtgggacctggcggaggccatcgtgcagaacccggacagcaagcctctgacggcgcagctgttcctggtggtacagcacagcagggacaacgaggcgttcagggaggcgctgctaaacatcgccgagcccgagggtcgctggctgctggagctgatcaacatcttgcagagcatcgtagttcaggagcgcagcctgagcttggccgagaaggtggcggcaatcaactactcggtgcttagcctgggcaagttttacgcgcgcaagatttacaagacgccgtacgtgcccatagacaaggaggtgaagatagacagcttttacatgcgcatggcgctcaaggtgctgacgctgagcgacgacctgggcgtgtaccgcaacgaccgcatccacaaggccgtgagcgcgagccggcggcgcgagctgagcgaccgcgagctgatgctgagcctgcgccgggcgctggtagggggcgccgccggcggcgaggagtcctacttcgacatgggggcggacctgcattggcagccgagccggcgcgccttggaggccgcctacggtccagaggacttggatgaggaagaggaagaggaggaggatgcacccgctgcggggtactgacgcctccgtgatgtgtttttagatgcagcaagccccggaccccgccataagggcggcgctgcaaagccagccgtccggtctagcatcggacgactgggaggctgcgatgcaacgcatcatggccctgacgacccgcaaccccgagtcctttagacaacagccgcaggccaacagactctcggccattctggaggcggtggtcccctctcggaccaaccccacgcacgagaaggtgctggcgatcgtgaacgcgctggcggagaacaaggccatccgtcccgacgaggccgggctagtgtacaacgccctgctggagcgcgtaggccgctacaacagcacaaacgtgcagtccaacctggaccggctggtgacggacgtgcgcgaggccgtggcgcagcgcgagcggttcaagaacgagggcctgggctcgctggtggcgctgaacgccttcctggcgacgcagccggcgaacgtgccgcgcgggcaggatgattacaccaactttatcagcgcgctgcggctgatggtgaccgaggtgccccagagcgaggtgtaccagtcgggcccggactactttttccaaactagcagacagggcctgcaaacggtgaacctgagccaggctttcaagaacctgcgcgggctgtggggcgtgcaggcgcccgtgggcgaccggtcgacggtgagcagcttgctgacgcccaactcgcggctgctgctgctgctgatcgcgcccttcaccgacagtggcagcgtaaaccgcaactcgtacctgggtcacctgctaacgctgtaccgcgaggccataggccaggcgcaggtggacgagcagaccttccaggagatcactagcgtgagccgcgcgctggggcagaacgacaccgacagtctgagggccaccctgaacttcttgctgaccaatagacagcagaagatcccggcgcagtacgcgctgtcggccgaggaggagcgcatcctgagatatgtgcagcagagcgtagggcttttcctgatgcaggagggggccactcccagcgccgcgctggacatgaccgcgcgcaacatggaacctagcatgtacgccgccaaccggccgtttatcaataagctaatggactacctgcatcgcgcggcgtccatgaactcggactactttaccaatgccattttgaacccgcactggcttccgccgccggggttctatacgggcgagtacgacatgcccgaccccaacgacgggtttttgtgggacgacgtggacagcgcggtgttttcaccgaccttgcaaaagcgccaggaggcggtgcgcacgcccgcgagcgagggcgcggtgggtcggagcccctttcctagcttagggagtttgcatagcttgccgggctctgtgaacagcggcagggtgagccggccgcgcttgctgggcgaggacgagtacctgaacgactcgctgctgcagccgccgcgggtcaagaacgccatggccaataacgggatagagagtctggtggacaaactgaaccgctggaagacctacgctcaggaccatagggagcctgcgcccgcgccgcggcgacagcgccacgaccggcagcggggcctggtgtgggacgacgaggactcggccgacgatagcagcgtgttggacttgggcgggagcggtggggtcaacccgttcgcgcatctgcagcccaaactggggcgacggatgttttgaatgcaaaataaaactcaccaaggccatagcgtgcgttctcttccttgttagagatgaggcgtgcggtggtgtcttcctctcctcctccctcgtacgagagcgtgatggcgcaggcgaccctggaggttccgtttgtgcctccgcggtatatggctcctacggagggcagaaacagcattcgttactcggagctggctccgttgtacgacaccactcgcgtgtacttggtggacaacaagtcggcggacatcgcttccctgaactatcaaaacgaccacagcaacttcctgaccacggtggtgcagaacaacgatttcacccccgccgaggctagcacgcagacgataaattttgacgagcggtcgcggtggggcggtgatctgaagaccattctgcacaccaacatgcccaatgtgaacgagtacatgttcaccagcaagtttaaggcgcgggtgatggtggctagaaaacacccacagggggtagaagcaacagatttaagcaaggatatcttagagtatgagtggtttgagtttaccctgcccgagggcaacttttccgagaccatgaccatagacctgatgaacaacgccatcttggaaaactacttgcaagtggggcggcaaaatggcgtgctggagagcgatattggagtcaagtttgacagcagaaatttcaagctgggctgggaccctgtgaccaagctggtgatgccaggggtctacacctacgaggcctttcacccggacgtggtgctgctgccgggctgcggggtggacttcacagagagccgcctgagcaacctcctgggcattcgcaagaagcaacctttccaagagggcttcagaatcatgtatgaggatctagaagggggcaacatccccgccctgctggatgtgcccaagtacttggaaagcaagaagaagttagaggaggcattggagaatgctgctaaagctaatggtcctgcaagaggagacagtagcgtctcaagagaggttgaaaaggcagctgaaaaagaacttgttattgagcccatcaagcaagatgatagcaagagaagttacaacctcatcgagggaaccatggacacgctgtaccgcagctggtacctgtcctatacctacggggaccctgagaagggggtgcagtcgtggacgctgctcaccaccccggacgtcacctgcggcgcggagcaagtctactggtcgctgccggacctcatgcaagaccccgtcaccttccgttctacccagcaagtcagcaactaccccgtggtcggcgccgagctcatgcccttccgcgccaagagcttttacaacgacctcgccgtctactcccagctcatccgcagctacacctccctcacccacgtcttcaaccgcttccccgacaaccagatcctctgccgtccgcccgcgcccaccatcaccaccgtcagtgaaaacgtgcctgctctcacagatcacgggacgctaccgctgcgcagcagtatccgcggagtccagcgagtgaccgtcactgacgcccgtcgccgcacctgtccctacgtctacaaggccctgggcatagtcgcgccgcgtgtgctttccagtcgcaccttctaaaaaatgtctattctcatctcgcccagcaataacaccggctggggtattactaggcccagcagcatgtacggaggagccaagaaacgctcccagcagcaccccgtccgcgtccgcggccacttccgcgctccctggggcgcttacaagcgcgggcggactgccaccgccgccgccgtgcgcaccaccgtcgacgacgtcatcgactcggtggtcgccgacgcgcgcaactatactcccgccccctcgaccgtggacgcggtcattgacagcgtggtggccgacgcgcgcgactatgccagacgcaagagccggcggcgacggatcgccaggcgccatcggagcacgcccgccatgcgcgccgcccgagctctgctgcgccgcgccagacgcacgggccgccgggccatgatgcgagccgcgcgccgcgccgccactgcaccccccgcaggcaggactcgcagacgagcggccgccgccgccgccgccgcggccatctctagcatgaccagacccaggcgcggaaacgtgtactgggtgcgcgactccgtcacgggcgtgcgcgtgcccgtgcgcacccgtcctcctcgtccctgatctaatgcttgtgtcctcccccgcaagcgacgatgtcaaagcgcaaaatcaaggaggagatgctccaggtcgtcgccccggagatttacggaccaccccaggcggaccagaaaccccgcaaaatcaagcgggttaaaaaaaaggatgaggtggacgagggggcagtagagtttgtgcgcgagttcgctccgcggcggcgcgtaaattggaaggggcgcagggtgcagcgcgtgttgcggcccggcacggcggtggtgttcacgcccggcgagcggtcctcggtcaggagcaagcgtagctatgacgaggtgtacggcgacgacgacatcctggaccaggcggcagagcgggcgggcgagtttgcctacgggaagcggtcgcgcgaagaggagctgatctcgctgccgctggacgagagcaatcccacgccgagcctgaagcccgtgaccctgcagcaggtgctgccccaggcggtgctgctgccgagccgcgggatcaagcgcgagggcgagaacatgtacccgaccatgcagatcatggtgcccaagcgccggcgcgtggaggaagtgctggacaccgtgaaaatggatgtggagcccgaggtcaaggtgcgccccatcaagcaggtggcgccgggcctgggcgtgcagaccgtggacattcagatccccaccgacatggatgtcgacaaaaaaccctcgaccagcatcgaggtgcagaccgacgacccctggctcccagcctccaccgctaccgcttccacttctaccgtcgccacggtcaccgagcctcccaggaggcgaagatggggccccgccaaccggctgatgcccaactacgtgttgcatccttccattatcccgacgccgggctaccgcggcacccggtactacgccagccgcaggcgcccagccagcaaacgccgccgccgcaccgccacccgccgccgtctgccccccgcccgcgtgcgccgcgtaaccacgcgccggggccgctcgctcgttctgcccaccgtgcgctaccaccccagcatcctttaatccgtgtgctgtgatactgttgcagagagatggctctcacttgccgcctgcgcatccccgttccgaattaccgaggaagatcccgccgcaggagaggcatggcaggcagcggcctgaaccgccgccggcggcgggccatgcgcaggcgcctgagtggcggctttctgcccgcgctcatccccataatcgcggcggccatcggcacgatcccgggcatagcttccgttgcgctgcaggcgtcgcagcgccgttgatgtgcgaataaagcctctttagactctgacacacctggtcctgtatatttttagaatggaagacatcaattttgcgtccctggctccgcggcacggcacgcggccgttcatgggcacctggaacgagatcggcaccagccagctgaacgggggcgccttcaattggagcagtgtctggagcgggcttaaaaatttcggctcgacgctccggacctatgggaacaaggcctggaatagtagcacggggcagttgttgagggaaaagctcaaagaccagaacttccagcagaaggtggtggacggcctggcctcgggcattaacggggtggtggacatcgcgaaccaggcagtgcagcgcgagataaacagccgtctggacccgcggccgcccacggtggtggagatggaagatgcaactcttccgccgccgaagggcgagaagcggccgcggccagatgcggaggagacgatcctgcaggtggacgagccgccctcgtacgaggaggccgtgaaggccggcatgcccaccacgcgcatcatcgcgccactggccacgggtgtaatgaaacccgccacccttgacctgcctccaccacccacgcccgctccaccgaaggcagctccggttgtgcagccccctccggtggcgaccgccgtgcgccgcgtccccgcccgccgccaggcccagaactggcagagcacgctgcacagtattgtgggcctgggagtgaaaagtctgaagcgccgccgatgctattgagagagaggaaggaggacactaaagggagagcttaacttgtatgtgccttaccgccagagaacgcgcgaagatggccaccccctcgatgatgccgcagtgggcgtacatgcacatcgccgggcaggacgcctcggagtacctgagcccgggtctggtgcagtttgcccgcgccaccgacacgtacttcagcctgggcaacaagtttaggaaccccacggtggccccgacccacgatgtgaccacggaccggtcccagcgtctgacgctgcgctttgtgcccgtggatcgcgaggacaccacgtactcgtacaaggcgcgcttcactctggccgtgggcgacaaccgggtgctagacatggccagcacgtactttgacatccgcggcgtcctggaccgcggtcccagtttcaaaccctactcgggcacggcttacaacagccttgcccccaagggcgctcccaatcccagtcagtgggttgccaaagaaaatggtcagggaactgataagacacatacttatggctcagctgccatgggaggaagcaacatcaccattgaaggtttagtaattggaactgatgaaaaagctgaggatggcaaaaaagatatttttgcaaataaactttatcagccagaacctcaagtaggtgaagaaaactggcaagagtctgaagccttctatggaggcagagctcttaagaaagacacaaaaatgaagccctgctatggctcatttgcaagacctaccaatgaaaaaggcggacaagctaaatttaagccagtggaagaggggcagcaacctaaagattatgacatagatttggctttctttgacacacctggaggcaccatcacaggaggcacagacgaagaatataaagcagacattgtgttgtacactgaaaatgtcaaccttgaaaccccagacacccacgtggtatacaagccaggaaaagaggatgacagttcagaagtaaatttgacacagcagtccatgcccaacaggcctaactacattggcttcagagacaactttgtgggactcatgtactacaacagtactggcaacatgggtgtgctggctggtcaggcctctcaattgaatgctgtggtcgacttgcaagacagaaacaccgagctgtcttaccagctcttgctagattctctgggtgacagaaccagatacttcagcatgtggaactctgcggtggatagctatgatccagatgtcaggatcattgaaaatcatggtgtggaagatgaacttccaaactattgcttcccattgaatggcactggcaccaattcaacatatcttggcgtaaaggtgaaaccagatcaagatggtgatgttgaaagcgagtgggataaagatgataccattgcaaggcagaatcaaatcgccaagggcaacgtctttgccatggagatcaacctccaggccaacctgtggaagagttttctgtactcgaacgtggccttgtacctgcccgactcctacaagtacacgccggccaatgttacgctgcccgccaacaccaacacctacgagtacatgaacggccgcgtggtagccccctcgctggtggacgcctacatcaacataggcgcccgatggtcgctggaccccatggacaacgtcaaccccttcaaccaccaccgcaatgcgggcctgcgctaccgctccatgcttctgggcaacggccgctacgtgcccttccacatccaagtgccccaaaagttctttgccatcaagaacctgctcctgctcccgggctcctacacctacgagtggaacttccgcaaggatgtcaacatgatcctgcagagttccctcggcaacgacctgcgcgtcgacggcgcctccgtccgcttcgacagcgtcaacctctacgccaccttcttccccatggcgcacaacaccgcctccaccctggaagccatgctgcgcaacgacaccaacgaccagtccttcaacgactacctctcggccgccaacatgctctaccccatcccggccaaggccaccaacgtgcccatctccatcccctcgcgcaactgggccgcttttcgcggctggagtttcacccgtctgaaaaccaaggaaactccctccctcggctcgggttttgacccctactttgtctactcgggctcgatcccctaccttgacgggaccttttaccttaaccacaccttcaagaaggtctccatcatgttcgactcctcggtcagctggcccggcaacgaccggctgctcacgccgaacgagttcgagatcaagcgcagcgtcgacggggagggctacaacgtggcccaatgcaacatgaccaaggactggttcctcgtccagatgctctcccactacaacatcggctaccagggcttccacgtgcccgagggctacaaggaccgcatgtactccttcttccgcaacttccagcccatgagcaggcaggtggtcgatgagatcaactacaaggactacaaggccgtcaccctgcccttccagcacaacaactcgggcttcaccggctaccttgcacccaccatgcgccaagggcagccctaccccgccaacttcccctacccgctcatcggccagacagccgtgccatccgtcacccagaaaaagttcctctgcgacagggtcatgtggcgcatccccttctccagcaacttcatgtccatgggcgccctcaccgacctgggtcagaacatgctctacgccaactcggcccacgcgctcgacatgaccttcgaggtggaccccatggatgagcccaccctcctctatcttctcttcgaagttttcgacgtggtcagagtgcaccagccgcaccgcggcgtcatcgaggccgtctacctgcgcacgcccttctccgccggaaacgccaccacctaagcatgagcggctccagcgaaagagagctcgcgtccatcgtgcgcgacctgggctgcgggccctactttttgggcacccacgacaagcgattcccgggctttcttgccggcgacaagctggcctgcgccatcgtcaacacggccggccgcgagaccggaggcgtgcactggctcgccttcggctggaacccgcgctcgcgcacctgctacatgttcgacccctttgggttctcggaccgccggctcaagcagatttacagcttcgagtacgaggccatgctgcgccgaagcgccctggcctcctcgcccgaccgctgtctcagcctcgaacagtccacccagaccgtgcaggggcccgactccgccgcctgcggacttttctgttgcatgttcttgcatgccttcgtgcactggcccgaccgacccatggacgggaaccccaccatgaacttgctgacgggggtgcccaacggcatgctacaatcgccacaggtgctgcccaccctcaggcgcaaccaggaggagctctatcgcttcctcgcgcgccactccccttactttcgctcccaccgcgccgccatcgaacacgccaccgcttttgacaaaatgaaacaactgcgtgtatctcaataaacagcacttttattttacatgcactggagtatatgcaagttatttaaaagtcgaaggggttctcgcgctcatcgttgtgcgccgcgctggggagggccacgttgcggtactggtacttgggctgccacttgaactcggggatcaccagtttgggcactggggtctcggggaaggtctcgctccacatacgccggctcatctgcagggcgcccagcatgtccggggcggatatcttgaaatcgcagttgggaccggtgctctgcgcgcgcgagttgcggtacacggggttgcagcactggaacaccatcagactggggtactttacgctggccagcacgctcttgtcgctgatctgatccttgtccagatcctcggcgttgctcaggccgaatggggtcatcttgcacagttggcgacccaggaatggcacgctctgaggcttgtggttacactcgcagtgcacgggcatcagcatcatccccgcgccgcgctgcatattcgggtagagggccttgacaaaggccgtgatctgcttgaaagcttgttgggccttggccccctcgctgaaaaacaggccgcagctcttcccgctgaactggttattcccgcacccggcatcctgcacgcagcagcgcgcgtcatggctggtcagttgcaccacgcttcttccccagcggttctgggtcaccttggctttgctgggttgctccttcaacgcgcgctgcccgttctcgctggtcacatccatctccaccacgtggtccttgtggatcatcaccgttccatgcagacacttgagctggccttccacctcggtgcagccgtgatcccacagggcactgccggtgcactcccagttcttgtgcgcgatcccgctgtggctgaagatgtaaccttgcaagaggcgacccatgatggtgctaaagctcttctgggtggtgaaggttagttgcagaccgcgggcctcctcgttcatccaggtctggcacatcttttggaagatctcggtctgctcgggcatgagcttgtaagcatcgcgcaggccgctgtcgacgcggtaacgttccatcagcacgttcatggtatccatgcccttttcccaggacgagaccagaggcagactcagggggttgcgcacgttcaggacaccgggggtcgcgggctcgacgatacgttttccgtccttgccttccttcaacagaaccggaggctggctgaatcccactcccacaatcacggcatcttcctggggcatctcttcgtcggggtctaccttggtcacatgcttggtctttctggcttgcttcttttttggagggctgtccacggggaccacgtcctcctcggaagacccggagcccacccgctgatactttcggcgcttggtgggcagaggaggtggcggcggcgaggggctcctctcctgctccggcggatagcgcgccgacccgtggccccggggcggagtggcctctcgctccatgaaccggcgcacgtcctgactgccgccggccattgtttcctaggggaagatggaggagcagccgcgtaagcaggagcaggaggaggacttaaccacccacgagcaacccaaaatcgagcaggacctgggcttcgaagagccggctcgtctagaacccccacaggatgaacaggagcacgagcaagacgcaggccaggaggagaccgacgctgggctcgagcatggctacctgggaggagaggaggatgtgctgctgaaacacctgcagcgccagtccctcatcctccgggacgccctggccgaccggagcgaaacccccctcagcgtcgaggagctgtgtcgggcctacgagctcaacctcttctcgccgcgcgtgccccccaaacgccagcccaacggcacctgcgagcccaacccgcgtctcaacttctatcccgtctttgcggtccccgaggcccttgccacctatcacatctttttcaagaaccaaaagatccccgtctcctgccgcgccaaccgcacccgcgccgacgcgctcctcgctctggggcccggcgcgcgcatacctgatattgcttccctggaagaggtgcccaaaatcttcgaagggctcggtcgggacgagacgcgcgcggcgaacgctctgaaagaaacagcagaggaagagggtcacactagcgccctggtagagttggaaggcgacaacgccaggctggccgtgctcaagcgcagcgttgagctcacccacttcgcctaccccgccgtcaacctcccgcccaaggtcatgcgtcgcatcatggatcagctaatcatgccccacatcgaggccctcgatgaaagtcaggagcagcgccccgaggacacccggcccgtggtcagcgatgagcagcttgcgcgctggcttggtacccgcgacccccaggccctggagcagcggcgcaagctcatgctggccgtggtcctggtcaccctcgagctcgaatgcatgcgacgctttttcagcgaccccgagaccctgcgcaaggtcgaggagaccctgcactacacttttaggcacggtttcgtcaggcaggcatgcaagatctccaacgtggagctgaccaacctggtctcctgcctgggaatcctgcacgagaaccgcctggggcagacagtgctccactcgaccctgaagggcgaggcgcggcgggactatgtccgcgactgcgtctttctctttctctgccacacatggcaagctgccatgggcgtgtggcagcagtgtctcgaggacgagaacctgaaggagctggacaagcttcttgctagaaacctcaaaaagctgtggacgggctttgacgagcgcaccgtcgcctcggacctggccgagatcgtcctccccgagcgcctgaggcagacgctgaaaggcgggctgcccgacttcatgagccagagcatgttgcaaaactaccgcactttcattctcgagcgatctgggatgctgcccgccacctgcaacgccttcccctccgactttgtcccgctgagctaccgcgagtgtcccccgccgctgtggagccactgctacctcttgcagctggccaactacatcgcctaccactcggatgttatcgaggacgtgagcggcgaggggctgctagagtgccactgccgctgcaacctgtgctctccgcaccgctccctggtctgcaacccccagctcctgagcgagacccaggtcatcggtaccttcgagctgcaaggtccgcaggagtccaccgctccgctgaaactcacgccggggttgtggacttccgcgtacctgcgcaaatttgtacccgaggactaccacgcccatgagataaagttcttcgaggaccaatcgcgcccgcagcacgcggatctcacggcctgcgtcatcacccagggcgcgatcctcgcccaattgcacgccatccaaaaatcccgccaagagtttcttttgaaaaagggtagaggggtctatctggacccccagacgggcgaggtgctcaacccgggtctcccccagcatgccgaggaagaagcaggagccgctagtggaggagatggaagaagaatgggacagccaggcagaggaggacgaatgggaggaggagacagaggaggaagaattggaagaggtggaagaggagcaggcaacagagcagcccgtcgccgcaccatccgcgccggcagccccggcggtcacggatacaacctccgcagctccggccaagcctcctcgtagatgggatcgagtgaagggtgacggtaagcacgagcggcagggctaccgatcatggagggcccacaaagccgcgatcatcgcctgcttgcaagactgcggggggaacatcgctttcgcccgccgctatctgctcttccatcgcggggtgaacatcccccgcaacgtgttgcattactaccgtcaccttcacagctaagaaaaaatcagaagtaagaggagtcgccggaggaggcctgaggatcgcggcgaacgagcccttgaccaccagggagctgaggaatcggatcttccccactctttatgccatttttcagcagagtcgaggtcagcagcaagagctcaaagtaaaaaaccggtctctgcgctcgctcacccgcagttgcttgtaccacaaaaacgaagatcagctgcagcgcactctcgaagacgccgaggctctgttccacaagtactgcgcgctcactcttaaagactaaggcgcgcccacccggaaaaaaggcgggaattacctcatcgccaccatgagcaaggagattcccaccccttacatgtggagctatcagccccagatgggcctggccgcgggcgcctcccaggactactccacccgcatgaactggctcagtgccggcccctcgatgatctcacgggtcaacggggtccgtaaccatcgaaaccagatattgttggagcaggcggcggtcacctcaacgcccagggcaaagctcaacccgcgtaattggccctccaccctggtgtatcaggaaatccccgggccgactaccgtactacttccgcgtgacgcactggccgaagtccgcatgactaactcaggtgtccagctggccggcggcgcttcccggtgcccgctccgcccacaatcgggtataaaaaccctggtgatacgaggcagaggcacacagctcaacgacgagttggtgagctcttcaatcggtctgcgaccggacggagtgttccaactagccggagccgggagatcgtccttcactcccaaccaggcctacctgaccttgcagagcagctcttcggagcctcgctccggaggcatcggaaccctccagtttgtggaggagtttgtgccctcggtctacttcaaccccttctcgggatcgccaggcctctacccggacgagttcataccgaacttcgacgcagtgagagaagcggtggacggctacgactgaatgtcttatggtgactcggctgagctcgctcggttgaggcacctagaccactgccgccgcctgcgctgcttcgcccgggagagctgcggacttatctactttgagtttcccgaggagcaccccaacggccctgcacacggagtgcggatcaccgtagagggcaccaccgagtctcacctggttaggttcttcacccagcaacccttcctggtcgagcgggaccggggaggcaccacctacaccgtctactgcatctgtccaaccccgaagttgcatgagaatttttgttgtactctgtgtgctgagtttaataaaagctaaactcctacaatactctgggatcccgtgtcgtcgcactcgcaacaagaccttcaacctcaccaaccagactgaggtaaaattcaactgcagaccgggggacaaatacatcctctggctttttaaaaacacttccttcgcagtctccaacgcctgcgccaacgacggtattgaaatacccaacaaccttaccagtggactaacttatactaccagaaagactaagctagtactctacaatccttttgtagagggaacctaccactgccagagcggaccttgcttccacactttcactttggtgaacgttaccgacagcagcacagccgctacagaaacatctaaccttctttttgatactaacactcctaaaaccggaggtgagctctgggttccctctctaacagaggggggtaaacatattgaagcggttgggtatttgattttaggggtggtcctgggtgggtgcatagcggtgctgtattaccttccttgctggatcgaaatcaaaatctttatctgctgggtcagacattgttgggaggaaccatgaaggggctcttgctgattatcctttccctggtggggggtgtactgtcatgccacgaacagccacgatgtaacatcaccacaggcaatgagaggagtgtgatatgcacagtagtcatcaaatgcgagcatacatgccctctcaacatcacattcaaaaaccgtaccatgggaaatgcatgggtgggcgactgggaaccaggagatgagcagaactacacggtcactgtccatggtagcaatggaaatcacacttttggtttcaaattcatttttgaagtcatgtgtgatatcacactgcatgtggctagacttcatggcttgtggccccctaccaaggataacatggttgggttttctttggcttttgtgatcatggcctgtgcaatgtcaggtctgctggtaggggctttagtgtggttcctaaagcgcaagcctaggtatggaaatgaggagaaggaaaaattgctataaatctttttctcttcgcagaaccatgaatacagtgatccgtatcgtgctgctctctcttcttgtaacttttagtcaggcaggatttcataccatcaatgctacatggtgggctaatataactttagtgggaccctcagatattccagtcacatggtatgatagcactggattgcaattttgtgatggaagtacagttaagaatccacagatcagacatagttgtaatgatcaaaacttaactctgattcatgtgaacaaaacccatgaaagaacatacatgggctataataagcagagtactcataaagaagactataaagtcacagttataccacctcctcctgttactgtaaagccacaaccagagccagaatatgtgtatgttaatatgggagagaacaaaaccttagttgggcctccaggaattccagttagttggtttaatcaggatggtttacaattttgcattggggataaagtttttcatccagaattcaaccacacctgtgacatgcaaaatcttacactgttgtttataaatcttacacatgatggagcttatcttggttataatcgccagggaactgaaagaacttggtatgaggttgtagtgtcagatggttttccaaaatcagaagagatgaaggtagaagaccatagtaaagaaacagaacaaaaacagactggtcaaaaacaaagtgaccataagcagggtgggcaaaaagaaacaagtcaaaagaaaactaatgacaaacaaaagccatcgcgcaggaggccatctaaactaaagccaaacacacctgacacaaaactaattacagtcactagtgggtcaaacgtaactttagttggtccagatggaaaggtcacttggtatgatgatgatttaaaaagaccatgtgagcctgggtataagttagggtgtaagtgtgacaatcaaaacctaaccctaatcaatgtaactaaactttatgagggagtttactatggtactaatgacagaggcaacagcaaaagatacagagtaaaagtaaacactactaattctcaaagtgtgaaaattcagccgtacaccaggcctactactcctgatcagaaacacagatttgaattgcaaattgattctaatcaagacaaaattccatcaactactgtggcaatcgtggtgggagtgatcgcgggctttgtaactctaatcattattttcatatgctacatctgctgccgcaagcgtcccaggtcatacaatcatatggtagacccactactcagcttctcttactgaaactcagtcactctcatttcagaaccatgaaggctttcacagcttgcgttctgattagcatagtcacacttagttcagctgcaatgattaatgttaatgtcactagaggtggtaaaattacattgaatgggacttatccacaaactacatggacaagatatcataaagatggatggaaaaatatttgtgaatggaatgttactgcatacaaatgcttcaataatggaagcattactattactgccactgccaacattacttctggcacatacaaagctgaaagctataaaaatgaaattaaaaaattaacctataaaaacaacaaaaccacatttgaagattctggaaattatgagcatcaaaaattatctttttatatgttgacaataattgaactgcctacaaccaaggcacccaccacagttagtacaactacacagtcaactgttaagaccactactcacactacacagctagacaccacagtgcagaataatactgtgttggttaggtatttgttgagggaggaaagtactactgaacagacagaggctacctcaagtgcctttatcagcactgcaaatttaacttcgcttgcttggactaatgaaaccggagtatcattgatgcatggccagccttactcaggtttggatattcaaattacttttctggttgtctgtgggatctttattcttgtggttcttctgtactttgtctgctgtaaagccagaaagaaatctaggaggcccatctacaggccagtgattggggaacctcagccactccaagtggatggaggcttaaggaatcttcttttctcttttacagtatggtgatcagccatgattcctaggttcttcctatttaacatcctcttctgtctcttcaacatctgtgctgcctttgcggcagtttcgcacgcctcgcccgactgtctagggcctttccccacctacctcctctttgccctgctcacctgcacctgcgtctgcagcattgtctgcctggtcatcaccttcctgcagctcatcgactggtgctgcgcgcgctacaattaccttcatcatagtcccgaatacagggacgagaacgtagccagaattttaaggctcatatgaccatgcagactctgctcatactgctatcgctcttatcccatgccctcgctactgctgattactctaaatgcaaattggcggacatatggaatttcttagactgctatcaggagaaaattgatatgccctcctattacttggtgattgtgggaatagttatggtctgctcctgcactttctttgccatcatgatctacccctgttttgatcttggatggaactctgttgaggcattcacatacacactagaaagcagttcactagcctccacgccaccacccacaccgcctccccgcagaaatcagtttcccatgattcagtacttagaagagccccctccccgacccccttccactgttagctactttcacataaccggcggcgatgactgaccaccacctggacctcgagatggacggccaggcctccgagcagcgcatcctgcaactgcgcgtccgtcagcagcaggagcgtgccgccaaggagctcctcgatgccatcaacatccaccagtgcaagaagggcatcttctgcctggtcaaacaggcaaagatcacctacgagctcgtgtccaacggcaaacagcatcgcctcacctatgagatgccccagcagaagcagaagttcacctgcatggtgggcgtcaaccccatagtcatcacccagcagtcgggcgagaccaacggctgcatccactgctcctgcgaaagccccgagtgtatctactcccttctcaagaccctttgcggactccgcgacctcctccccatgaactgatgttgattaaaaaccaaaaaaaacaatcagccccttcccctatcccaaattactcgcaaaaataaatcattggaactaatcatttaataaagatcacttacttgaaatctgaaagtatgtctctggtgtagttgttcagcagcacctcggtaccctcctcccaactctggtactccagtctccggcgggcggcgaactttctccacaccttgaaagggatgtcaaattcctggtccacaattttcattgtcttccctctcagatgtcaaagaggctccgggtggaagatgacttcaaccccgtctacccctatggctacgcgcggaatcagaatatccccttcctcactcccccctttgtctcctccgatggattcaaaaacttcccccctggggtcctgtcactcaaactggctgacccaatcaccatagccaatggtgatgtctcactcaaggtgggagggggacttactttgcaagaaggaagtctgactgtagaccctaaggctcccttgcaacttgcaaacaataaaaaacttgagcttgtttatgttgatccatttgaggttagtgccaataaacttagtttaaaagtaggacatggattaaaaatattagatgacaaaagtgctggagggttgaaagatttaattggcaaacttgtggttttaacagggaaaggaataggcactgaaaatttgcaaaatacagatggtagcagcagaggaattggtataagtgtaagagcaagagaagggttaacatttgacaatgatggatacttggtagcatggaacccaaagtatgacacgcgcacactttggacaacaccagacacatctcctaattgcaggattgataaggagaaggattcaaaactcactttggtacttacaaagtgtggaagtcaaatattagctaatgtgtctttgattgtggtgtcaggaaaatatcaatacatagaccacgctacaaatccaactcttaaatcatttaaaataaaacttctttttgataataaaggtgtacttctcccaagttcaaaccttgattccacatattggaactttagaagtgacaatttaactgtatctgaggcatataaaaatgcagttgaatttatgcctaatttggtagcctacccaaaacctaccactggctctaaaaaatatgcaagggatatagtctatgggaacatatatcttggaggtttggcatatcagccagttgtaattaaggttacttttaatgaagaagcagatagtgcttactctataacatttgaatttgtatggaataaagaatatgccagggttgaatttgaaaccacttcctttaccttctcctatattgcccaacaataaaagaccaataaacgtgttttttatttcaaattttatgtatctttattgatttttacaccagcgcgagtagtcaatctcccaccaccagcccatttcacagtgtacacggttctctcagcacgggtggccttaaatagggaaatgttctgattagtgcgggaactggacttggggtctataatccacacagtttcctggcgagccaaacggggatcggtgattgaaatgaagccgtcctctgaaaagtcatccaagcgggcctcacagtccaaggtcacagtctggtggaacgagaagaacgcacagattcatactcggaaaacaggatgggtctgtgcctctccatcagcgccctcagcagtctctgccgccggggctcggtgcggctgctgcagatgggatcgggatcacaagtctctctaactatgatcccaacagccttcagcatcagtctcctggtgcgtcgagcacagcaccgcatcctgatctctgccatgttctcacagtaagtgcagcacataatcaccatgttattcagcagcccataattcagggtgctccagccaaagctcatgttggggatgatggaacccacgtgaccatcgtaccagatgcggcagtatatcaggtgcctgcccctcatgaacacactgcccatatacatgatctctttgggcatgtttctgtttacaatctggcggtaccaggggaagcgctggttgaacatgcacccgtaaatgactctcctgaaccacacggccagcagggtgcctcccgcccgacactgcagggagccaggggatgaacagtggcaatgcaggatccagcgctcgtacccgctcaccatctgagctcttaccaagtccagggtagcggggcacaggcacactgacatacatctttttaaaatttttatttcctctgtggtgaggatcatatcccaggggactggaaactcttggagcagggtaaagccagcagcacatggtaatccacggacagaacttacattatgataatctgcatgatcacaatcgggcaacaggggatgttgatcagtcagtgaagccctggtttcatcatcagatcgtggtaaacgggccctgcgatatggatgatggcggagcgagctggattgaatctcggtttgcattgtagtggattctcttgcgtaccttgtcgtacttctgccagcagaaatgggcccttgaacagcatatacccctcctgcggccgtcctttcgctgctgccgctcagtcatccaactgaagtacatccattctcgaagattctggagaagttcctctgcatctgatgaaataaaaaacccgtccatgcgaattcccctcatcacatcagccaggactctgtaggccatccccatccagttaatgctgccttgtctatcattcagagggggcggtggcaggattggaagaaccatttttattccaaacggtctcgaaggacgataaagtgcaagtcacgcaggtgacagcgttcccctccgctgtgctggtggaaacagacagccaggtcaaaacccactctattttcaaggtgctcgaccgtggcttcgagcagtggctctacgcgtacatccagcataagaatcacattaaaggctggccctccatcgatttcatcaatcatcaggttacattcctgcaccatccccaggtaattctcatttttccagccttggattatctctacaaattgttggtgtaaatccactccgcacatgttgaaaagctcccacagtgccccctccactttcataatcaggcagaccttcataatagaaacagatcctgctgctccaccacctgcagcgtgttcaaaacaacaagattcaataaggttctgccctccgccctgagctcgcgcctcaatgtcagctgcaaaaagtcacttaagtcctgggccactacagctgacaattcagagccagggctaagcgtgggactggcaagcgtgagggaaaactttaatgctccaaagctagcacccaaaaactgcatgctggaataagctctctttgtgtctccggtgatgccttccaaaatgtgagtgataaagcgtggtagtttttctttaatcatttgcgtaatagaaaagtcctgtaaataagtcactaggaccccagggaccacaatgtggtagcttacaccgcgtcgctgaagcatggttagtagagatgagagtctgaaaaacagaaagcatgcgctaaactaaggtggctattttcactgaaggaaaaatcactctttccagcagcagggtacccactgggtggcccttgcggacatacaaaaatcggtccgtgtgattaaaaagcagcacagtaagttcctgtcttcttccggcaaaaatcacatcggactgggttagtatgtccctggcatggtagtcattcaaggccataaatctgccctgatatccagtaggaaccagcacactcacttttaggtgaagcaataccaccccatgcggaggaatgtggaaagattcagggcaaaaaaaattatatctattgctagccccttcctggacgggagcaatccctccaggactatctatgaaagcatacagagattcagccatagctcagcccgcttaccagtagacaaagagcacagcagtacaagcgccaacagcagcgactgactacccactgacttagctccctatttaaaggcaccttacactgacgtaatgaccaaaggtctaaaaaccccgccaaaaaaaacacacacgccctgggtgtttttgcgaaaacacttccgcgttctcacttcctcgtatcgatttcgtgacttaacttccgggttcccacgttacgtcacttttgcccttacatgtaacttagtcgtagggcgccatcttgcccacgtccaaaatggcttacatgtccagttacgcctccgcggcgaccgttagccgtgcgtcgtgacgtcatttgcatcaacgtttctcggccaatcagcagtagccccgccctaaatttaaaacctcatttgcatattaacttttgtttactttgtggggtatattagttttcgcgccaaaatgacctaatttcacttgcatccgcccagaattacctcatatccgggcgtggccgcgggaaaatcggccgtttccgggtttaaagtccgcttttttatacgtcatcagccccgcgacttgcttccgggctaggccacgcctccgcggcgaccgttagccgtgcgtcgtgacgtcatttgcatcaacgtttctcggccaatcagcagtagccccgccctaaatttaaaacctcatttgcatattaacttttgtttactttgtggggtatattagttttcgcgccaaaatgacctaatttcacttgcatccgcccagaattacctcatatccgggcgtggccgcgggaaaatcggccgtttccgggtttaaagtccgcttttttatacgtcatcagccccgcgacttgcttccgggctaggccacgcctccgcggcgaccgttagccgtgcgtcgtgacgtcatttgcatcaacgtttctcggccaatcagcagtagccccgccctaaatttaaaacctcatttgcatattaacttttgtttactttgtggggtatattattgatgatg

SEQ ID NO: 23 - DNA, 35177 bp, Adenovirus D20
  MISC_FEATURE (1)..(35177): Complete Genome
catcatcaataatataccccacaaagtaaacaaaagttaatatgtaaatgagcttttgaatttagggcggggccgacgctgattggccgttgcaagaaccgttagtgacgtcacgacgcacggccgacggccgccgcggaggcgtggcctagtccggaagcaagtcgcggggctgatgacgtataaaaaagcggactttagacccggaaacggccgattttcccgcggccacgcccggatatgaggtaattctgggcggatgcaagtgaaattaggccattttggcgcgaaaactgaatgaggaagtgaaaagtgaaaaataccgggcccgcccagggcggaatatttaccgagggccgagagactttgaccgattacgtgggggtttcgattgcggtgttttttcgtgaatttccgcgtccgtgtcaaagtccggtgtttatgtcacagatcagctgatccacagggtatttaaaccagtcgatcccgtcaagaggccactcttgagtgccagcgagtagagatttctctgagctccgctcccagagtctgagaaaaatgagacacctgcgcctcctgtcttcaactgtgcctattgacatggccgcattattgctggaggattatgtgagtacaatattggaggacgaactgcatccatctccattcgagctgggacctacacttcaggacctatatgatttggaggtagatgcccatgatgacgacccgaacgaagaggctgtgaatttaatatttccagaatctctgattcttcaggctgacatagccagcgaagctgtacctacaccacttcatacaccgactctgtcacccatacctgaattggaagaggaggacgagctagacctccgatgttatgaggaaggttttcctcccagcgattcagaggacgaacagggtgagcagagcatgactctaatctcagaatatgcttgtgtggttgtggaagagcattttgtgttggacaatcctgaggtgcccgggcaaggctgtagatcctgccagtaccaccgggataagaccggagacacgaacgcctcctgcgctctgtgttacatgaaaaagaacttcagctttatttacagtaagtggagtaaatgtgagagagactgagtgcttaacacataactgggtgatgcttaaacagctgtgctaagtgtggtttatttttgtttctaggtccggtgtcagaggatgagtcatcaccctcagaagaagaccacccgtgtccccctgagctgtcaggcgaaacgcccctgcaagtgcacagacccaccccagtcagacccagtggcgagaggcgagcagctgttgaaaaaattgaggacttgttacatgacatgggtggggatgaacctttggacctgagcttgaaacgccccaggaactaggctcagctgtgcttagtcatgtgtaaataaagttgtacaataaaagtatatgtgacgcatgcaaggtgtggtttatgactcatgggcgtggcttagtcctatataagtggcaacacctgggcactggggcacagaccttcagggagttcctgatggatgtgtggactatccttgcagactttagcaagacacgccggcttgtagaggatagttcagacgggtgctccgggttctggagacactggtttggaactcctctatctcgtctggtgtacacagttaagaaggattataacgaggaaattgaaaatctttttgctgattgctctggcctgctagattctctgaatctcggccaccagtcccttttccaggaaagggtactccacagccttgatttttccagcccagggcgcactacagccggggttgcttttgtggtttttctggttgacaaatggagccagaacacccaactgagcaggggctacattctggacttcgcagccatgcacctgtggagggcatgggtgaggcagcggggacagagaatcttgaactactggcttatacagccagcagctccgggtcttcttcgtctacacagacaaacatccatgttggaggaagaaatgaggcaggccatggacgagaacccgaggagcggcctggaccctccgtcggaagaggagctggattgaatcaggtatccagcttgtacccagagcttagcaaggtgctgacatccatggccaggggagtgaagagggagaggagcgatgggggcaataccgggatgatgaccgagctgacggccagcctgatgaatcgcaagcgcccagagcgcattacatggcacgagctacagatggagtgcagggatgagttgggcctgatgcaggataaatatggcctggagcagataaaaacacattggttgaacccagatgaggattgggaggaggccattaagaaatatgccaagatagccctgcgcccagattgcaagtacatagtgaccaagaccgtgaatattagacatgcctgctacatttcgggtaacggggcagaggtggtcatcgataccctggacaaggccgccttcaggtgttgcatgatgggaatgagagcaggagtgatgaatatgaattccatgatcttcatgaacatgaagttcaatggagagaagtttaatggggtgctgttcatggccaacagccacatgaccctgcatggctgcagtttctttggcttcaacaatatgtgcgccgaggtctggggcgcttccaagatcaggggatgtaagttttatggctgttggatgggcgtagtgggaagacccaagagcgagatgtctgtgaagcagtgtgtgtttgagaaatgctacctgggagtctctaccgagggcaatgctagagtgagacactgctcttccctggatacgggctgtttctgcctggtgaagggtacggcctctctgaagcataatatggtgaagggctgcacagatgagcgcatgtacaacatgctgacctgcgactcgggggtctgccatatcctgaagaacatccatgtgacctcccaccccagaaagaagtggccagtgtttgagaataacctgctgatcaagtgccatatgcacctgggtgccagaaggggcaccttccagccgtaccagtgcaactttagccagaccaagctgctgttggagaacgatgccttctccagggtgaacctgaacggcatctttgacatggatgtctcggtgtacaagatcctgagatacgatgagaccaggtccagggtgcgcgcttgcgagtgcgggggcagacacaccaggatgcagcctgtggccctggatgtgacagaggagctgagaccagaccacctggtgatggcctgtaccgggaccgagttcagctccagcggggaggacacagattagaggtaggtttgagtagtgggcgtggctaatgtgagtataaaggtgggtgtcttacgagggtctttttgcttttctgcagacatcatgaacgggaccggcggggccttcgaaggggggctttttagcccttatttgacaacccgcctgccgggatgggccggagttcgtcagaatgtgatgggatctacggtggatgggcgcccagtgcttccagcaaattcctcgaccatgacctacgcgaccgtggggaactcgtcgctcgacagcaccgccgcagccgcggcagccgcagccgccatgacagcgacgagactagcctcgagctacatgcccagcagcggtagcagcccctctgtgcccagttccatcatcgccgaggagaaactgctggccctgctggccgagctggaagccctgagccgccagctggccgccctgacccagcaggtgtccgagctccgcgagcagcagcagcaaaataaatgattcaataaacacagattctgattcaaaagcaaagcatctttattatttattttttcgcgcgcggtaggccctggtccacctctcccgatcattgagagtgcggtggattttttccaggacccgatagaggtgggattggatgttgaggtacatgggcatgagcccgtcccgggggtggaggtagcaccactgcatggcctcgtgctctggggtcgtgttgtagatgatccagtcatagcaggggcgctgggcgtggtgctggatgatgtccttgaggaggagactgatggccacggggagccccttggtgtaggtgttggcaaaacggttgagctgggagggatgcatgcggggggagatgatgtgcagtttggcctggatcttgaggttggcgatgttgccgcccagatcccgccgggggttcatgttgtgcaggaccaccaggacggtgtagcctgtgcacttggggaacttgtcatgcaacttggaagggaatgcgtggaagaatttggagacgcccttgtgcccgcccaggttttccatgcactcatccatgatgatggcaatgggcccgtgggctgcggctttggcaaagacgtttctggggtcagagacatcataattatgctcctgggtgagatcatcataagacattttaatgaatttggggcggagggtgccagattgggggactatggttccctcggggcccggggcgaagttcccctcgcagatctgcatctcccaggctttcatctcggaggggggaatcatgtccacctgcggggcgatgaaaaagacggtttccggggcgggggtgatgagctgcgaggagaggaggtttctcagcagctgggacttgccgcacccggtcggaccgtagatgaccccgatgactggttgcaggtggtagttcaaggagatgcagctgccgtcgtcccggaggaggggggccacctcgttgagcatgtccctgacttggaggttttcccggacgagctcgccgaggaggcggtccccgcccagcgaaagcagctcttgcagtgaagcaaagtttttcaggggcttgagcccgtcggccatgggcatcttggcgagggtctgcgagaggagttccaaccggtcccagagctcggtgacgtgctctacggcatctcgatccagcagacttcctcgtttcgggggttgggacgactgcgactgtagggcacgagacgatgggcgtccagcgcggccagcgtcatgtccttccagggtctcagggtccgagtgagggtggtctccgtcacggtgaaggggtgggccccgggctgggcgcttgcaagggtgcgcttgagactcatcctgctggtgctgaaacgggcacggtcttcgccctgcgcgtcggcgagatagcagttgaccatgagctcgtagttaagggcctcggcggcatggcccttggcgcggagctttcctttggaagagcgcccgcaggcgggacagaggagggattgcagggcgtagagcttgggcgctagaaagacggactcgggggcgaaggcgtccgctccgcagtgggcgcagacggtctcgcactcgacgagccaggtgagctcggggtgatcggggtcaaaaaccagttttcccccgttctttttgatgcgcttcttacctcgcgtctccatgagtctgtgtccgcgttcggtgacaaacaggctgtctgtgtccccgtagacggacttgatgggcctgtcctgcaggggcgtcccgcggtcctcctcgtagagaaactcggaccactctgagacaaaggcgcgcgtccacgccaagacaaaggaggccacgtgcgaggggtagcggtcgttgtccaccagggggtccaccttttccacggtatgcagacacatgtccccctcctccgcatccaagaaggtgattggcttgtaggtgtaggccacgtgacctggggtccccgacgggggggtataaaagggggcgggtctgtgctcgtcctcactctcttccgcgtcgctgtccacgagcgccagctgttggggtaggtattccctctcgagaacgggcatgacctcggcactcaggttgtcagtttctagaaacgaggaggatttgatgttggcctgccctgccgcgatgcttttgagtaaactttcatccatctggtcagaaaagacaatttttttattgtcaagcttggtggcaaaggagccatagagggcgttggagagaagcttggcgatggatctcatggtctgatttttgtcatggtcggcgcgctccttggccgcgatgttgagctggacatactcgcgcgcgacgcacttccattcggggaagacggtggtgcgctcgtcgggcacgatcctgacgcgccagccgcggttatgcagggtgaccaggtccacgctggtggccacctcgccgcgcaggggctcgttggtccagcagagtctgccgcccttgcgcgagcaaaacgggggcagcacatccaggaggtgctcgtcgggggggtccgcatcgatggtgaagatgcccggacagagttccttgtcaaaataatcgatttttaaggatgcatcatccaaggccatctgccactcgcgggcggccagcgctcgctcgtaggggttgaggggcggaccccaaggcatgggatgtgtgagggcggaggcgtacatgccgcagatgtcgtagacatagatgggctccgagaggatgccgatgtaggtgggataacagcgccccccgcggatgctggcgcgcacgtagtcatacaactcgtgcgagggggccaagaaggcggggccgagattggtgcgctggggctgctcggcgcggaagacgatctggcgaaagatggcatgcgagtttgaggagatggtgggccgttggaagatgttaaagtgggcgtggggcaggcggaccgagtcgcggatgaagtgcgcgtaggagtcttgcagcttggcgacgagctcggcggtgacgaggacgtccatggcgcagtagtccagtgtttcgcggatgatgtcataacccgcctctcctttcttctcccatagctcgcggttgagggcgtactcctcgtcatccttccagtactcccggagcgggaatcctcgatcgtccgcacggtaagagcccagcatgtagaaatggttcacggccttgtagggacagcagcccttctccacggggagggcgtaagcttgagcggccttgcggagcgaggtgtgcgtcagggcgaaggtgtctctgaccatgactttcaagaactggtacttgaagtccgagtcgtcgcagccgccgtgctcccagagctcgaaatcggtgcgcttcttcgagagggggttaggcagagcgaaagtgacgtcattgaagagaattttgcctgcccgcggcatgaaattgcgggtgatgcggaaagggcccgggacggaggctcggttgttgatgacctgggcggcgaggacgatctcgtcgaagccgttgatgttgtgcccgacgatgtagagttccatgaatcgcgggcggcctttgatgtgcggcagctttttgagttcctcgtaggtgaggtcctcggggcattgcaggccgtgctgctcgagcgcccactcctggagatgtgggttggcttgcatgaaggaagcccagagctcgcgggccatgagggtctggagctcgtcgcgaaagaggcggaactgctggcccacggccatcttttctggggtgacgcagtagaaggtgagggggtcacgctcccagcgatcccagcgtaagcgcacggcgagatcgcgagcgagggcgaccagctcggggtcccccgagaatttcatgaccagcatgaaggggacgagctgcttgccgaaggaccccatccaggtgtaggtttctacatcgtaggtgacaaagagccgctccgtgcgaggatgagagccgattgggaagaactggatttcctgccaccagttggacgagtggctgttgatgtgatgaaagtagaaatcccgccggcgaaccgagcactcatgctgatgcttgtaaaagcgtccgcagtactcgcagcgctgcacgggctgtacctcatccacgagatacacagcgcgtcccttgaggaggaacttcaggagtggcggccctggctggtggttttcatgttcgcctgcgtgggactcaccctggggctcctcgaggacggagaggctgacgagcccgcgcgggagccaggtccagatctcggcgcggcgggggcggagagcgaagacaagggcgcgcagttgggagctgtccatggtgtcgcggagatccaggtcagggggcagggttctgaggttgacctcgtagaggcgggtgagggcgtgcttgagatgcagatggtacttgatttctacgggtgagttggtggccgtgtccacgcattgcatgagcccgtagctgcgcggggccacgaccgtgccgcggtgcgcttttagaagcggtgtcgcggacgcgctcccggcggcagcggcggttccggccccgcgggcaggggcggcagaggcacttcggcgtggcgctcgggcaggtcccggtgctgcgccctgagagcgctggcgtgcgcgacgacgcggcggttgacatcctggatctgccgcctctgtgtgaagaccactggccccgtgactttgaacctgaaagacagttcaacagaatcaatctcggcgtcattgacggcggcctgacgcaggatctcttgcacgtcgcccgagttgtcctggtaggcgatctcggacatgaactgttcgatctcctcctcctggagatcgccgcggcccgcgcgctcgacggtggcggcgaggtcgttggagatgcgacccatgagctgcgagaaggcgcccaggccgctctcgttccagacgcggctgtagaccacgtccccgtcggcgttgcgcgcgcgcatgaccacctgcgcgaggttgagctccacgtgccgcgtgaagacagcgtagttgcgcaggcgttggaagaggtagttgagggtggtggcgatgtgctcggtgacgaagaagtacatgatccagcggcgcaggggcatctcgctgatgtcgccgatggcctccagcctttccatggcctcgtagaagtccacggcgaagttgaaaaactgggcgttgcgggccgagaccgtgagctcgtcttccaggagccggatgagctcggcgatggtggcgcgcacctcgcgctcgaaatccccgggggtctcctcctcttcctcttcttccatgacgacctcttcttctatttcttcctctgggggcggtggtggtggcggggcgcgacgacgacggcgacgcaccgggagacggtcgacgaagcgctcgatcatctccccgcggcggcgacgcatggtttcggttacggcgcgaccccgttcgcgaggacgcagcgtgaagacgccgccggtcatctcccggtaatggggcgggtccccgttgggcagcgagagggcgctgacgatgcatcttatcaattgcggtgtaggggacgtgagcgcgtcgagatcgaccggatcggagaatctttcgaggaaagcgtctagccaatcgcagtcgcaaggtaagctcaaacacgtagcagccctgtggacgctgttagaattgcggttgctgatgatgtaattgaagtaggcgtttttgaggcggcggatggtggcgaggaggaccaggtccttgggtcccgcttgctggatgcggagccgctcggccatgccccaggcctggccctgacaccggctcaggttcttgtagtagtcatgcatgagcctttcaatgtcatcactggcggaggcagagtcttccatgcgggtgaccccgacgcccctgagcggctgcacgagcgccaggtcggcgacgacgcgctcggcgaggatggcctgttgcacgcgggtgagggtgtcctggaagtcgtccatgtcgacgaagcggtggtaggcccctgtgttgatggtgtaggtgcagttggccatgagcgaccagttaacggtctgcaagccgggctgcacgacctccgagtacctgagccgcgagaaggcgcgcgagtcgaatacgtagtcgttgcaggtgcgcacgaggtactggtatccgactagaaagtgcggcggcggctggcggtagagcggccagcgctgggtggccggcgcgcccggggccaggtcctcgagcatgaggcggtggtagccgtagacgtagcgggacatccaggtgatgccggcggcggtggtggaggcgcgcgggaactcgcggacgcggttccatatgttgcgcagcggcaggaaatagtccatggtcggcacggtctggccggtgagacgcgcgcagtcattgacgctctagaggcaaaaacgaaagcggttgagcgggctcttcctccgtagcctggcggaacgcaaacgggttaggccgcgtgtgtaccccggttcgagtcccctcgaatcaggctggagccgcgactaacgtggtattggcactcccgtctcgacccaagcccgatagccgccaggatacggcggagagccctttttgccggccgaggggggtcgctagacttgaaagcggccgaaaaccctgccgggcagtggctcgcgcccgtagtctggagaagcatcgccagggttgagtcgcggcagaacccggttcgcggacggccgcggcgagcgggacttggtcaccccgccgatttaaagacccacagccagccgacttctccagttacgggagcgagcccccttttttctttttgccagatgcatcccgtcctgcgccaaatgcgtcccacccccccggcgaccaccgcgaccgcggccgtagcaggcgccggcgctagccagccacagccacagacagagatggacttggaagagggcgaagggctggcgagactgggggcgccgtccccggagcgacacccccgagtgcagctgcaaaaggacgtgcgcccggcgtacgtgcctgcgcagaacctgttcagggaccgcagcggggaggagcccgaggagatgcgcgactgccgttttcgggcgggcagggagctgcgcgagggcctggactgccagcgcgtgctgcgcgacgaggatttcgagccgaacgagcagacggggatcagccccgcgcgcgctcacgtggcagcggccaacctggtgacggcctacgagcagacggtgaagcaggagcgcaacttccaaaagagtttcaacaaccatgtgcgcacgctgatcgcgcgcgaggaggtggccctgggcctgatgcacctgtgggacctggcggaggccatcgtgcagaacccggacagcaagcctctgacggcgcagctgttcctggtggtgcagcacagcagggacaacgaggcgttcagggaggcgctgctgaacatcgccgagcccgagggccgctggctgctggagctgattaacatcttgcagagcattgtagtgcaggagcgcagcctgagcttggccgagaaggtggcggctatcaactactcggtgctgagcctgggcaagttttacgcgcgcaagatttacaagacgccgtacgtgcccatagacaaggaggtgaagatagacagcttttacatgcgcatggcgctcaaggtgctgacgctgagcgacgacctgggcgtgtaccgcaacgaccgcattcacaaggccgtgagcacgagccggcggcgcgagctaagcgaccgcgagttgatgctgagcctgcgccgggcgctggtagggggcgcctccggcggcgaggagtcctacttcgacatgggggcggacctgcattggcagccgagccggcgcgccttggaggccgtctatggtccagaggacttggatgaggaagaggaagaggaggaggatgcacccgttgcggggtactgacgcctccgtgatgtgtttttagatgtcccagcagcaagccccggaccccgccataagggcggcgctgcaaagccagccgtccggtctagcatcggacgactgggaggccgcgatgcaacgcatcatggccctgacgacccgcaaccccgagtcctttagacaacagccgcaggccaacagactttcggccattctggaggcggtggtcccctctcggaccaaccccacgcacgagaaggtgctggcgatcgtgaacgcgctggcggagaacaaggccattcgtcccgacgaggctgggctggtatacaacgccctgctggagcgcgtgggccgctacaacagcacgaacgtgcagtccaacctggaccggctggtgacggacgtgcgcgaggccgtggcgcagcgcgagcggttcaagaacgagggcctgggctcgctggtggcgctgaacgccttcctggcgacgcagccggcgaacgtgccgcgcgggcaggacgattataccaactttatcagcgcgctgcggctgatggtgaccgaggttccccagagcgaggtgtaccagtcgggcccggactactttttccagactagcagacagggcctgcagacggtgaacctgagccaggctttcaagaacctgcgcgggctgtggggcgtgcaggcgcccgtgggcgaccggtcgacggtgagcagcttgctgacgcccaactcgcggctgctgctgctgctgatcgcgcccttcaccgacagcggcagtgtgaaccgcaactcgtacctgggtcacctgctgacgctgtaccgcgaggccataggccaggcacaggtggacgagcagaccttccaggagatcactagtgtaagccgcgcgctggggcagaacgacaccgacagtctgagggccaccctgaacttcttgctgaccaatagacagcagaagatcccggcgcagtatgcgctgtcggccgaggaggagcgcatcctgagatatgtgcaacagagcgtagggctgttcctgatgcaggagggggccacccccagcgccgcgctggacatgaccgcgcgcaacatggaacctagcatgtacgccgccaaccggccgtttatcaataagctgatggactacctgcaccgcgcggcgtccatgaactcggactactttaccaatgccattttgaacccgcactggctcccgccaccggggttctacacgggcgagtacgacatgcccgaccccaacgacgggtttctgtgggacgatgtggacagcgcggtgttttccccgaccttgcaaaagcgccaggaggcggtgcgcacgcccgcgagcgagggcgcagtgggtcggagcccctttcctagcttagggagtttgcatagcttgccgggctcggtgaacagcggcagggtgagccggccgcgcttgctgggcgaggacgagtacctgaacgactcgctgctgcagccgccgcgggtcaagaacgccatggccaataacgggatagagagtctggtggacaaactgaaccgctggaagacctacgctcaggaccatagggagcctgcgcccgcgccgcggcgacagcgccacgaccggcagcggggcctggtgtgggacgacgaggactcggccgacgatagcagcgtgttggacttgggcgggagcggtggggccaacccgttcgcgcatctgcagcccagactggggcgacggatgttttgaatgcaaaataaaactcaccaaggccatagcgtgcgttctcttccttgttagagatgaggcgtgcgatggtgtcttcctctcctcctccctcgtacgagagcgtgatggcgcaggcgaccctggaggttccgtttgtgcctccgcggtatatggctcctacggagggcagaaacagcattcgttactcggagctggctccgctgtacgacaccactcgcgtgtacttggtggacaacaagtcggcggacatcgcttccctgaactaccaaaacgaccacagcaacttcctgaccacggtggtgcagaacaacgatttcacccccgccgaggctagcacgcagacgataaattttgacgagcggtcgcggtggggcggtgatctgaagaccattctgcacaccaacatgcccaatgtgaacgagtacatgttcaccagcaagtttaaggcgcgggtgatggtggctaggaagcacccagatggtgtagacaaagatgatttaagcaaggatatcttagagtatgagtggtttgagtttaccctgcccgagggcaacttttccgagaccatgaccatagacctgatgaacaacgccatcttggaaaactacttgcaagtggggcggcaaaatggcgtgctggagagcgatattggagtcaagtttgacagcaggaatttcaagctgggctgggacccggtgaccaagctggtgatgccaggggtctacacctacgaggccttccacccggacgtggtgctgctgccgggctgcggggtggacttcaccgagagccgcctgagcaacctcctgggcattcgcaagaagcaacctttccaagagggcttcagaatcatgtatgaggatctagtagggggcaacatccccgccctcctgaatgtcaaggagtatctgaaggataaggaagaagctggcacagcagatgcaaataccattaaggctcagaatgatgcagtcccaagaggagataactatgcatcagcggcagaagccaaagcagcaggaaaagaaattgagttgaaggccattttgaaagatgattcaaacagaagctacaatgtgatcgagggaaccacagacaccctgtaccgcagttggtacctgtcctatacctacggggaccccgagaagggggtgcagtcgtggacgctgctcaccaccccggacgtcacctgcggcgcggagcaagtctactggtcgctgccggacctcatgcaagaccccgtcaccttccgctctacccagcaagtcagcaactaccccgtggttggcgccgagctcatgcccttccgcgccaagagcttttacaacgacctcgccgtctactcccagctcatccgcagctacacctccctcacccacgtcttcaaccgcttccccgacaaccagatcctctgccgcccgcccgcgcccaccatcaccaccgtcagtgaaaacgtgcctgctctcacagatcacgggacgcttccgctgcgcagcagtatccgcggagtccagcgagtgaccgtcactgacgcccgtcgccgcacctgtccctacgtctacaaggccctgggcatagtcgcgccgcgcgtgctatccagtcgcaccttctaaaaaatgtctattctcatctcgcccagcaataacaccggctggggtcttactaggcccagcaccatgtacggaggagccaagaagcgctcccagcagcaccccgtccgcgtccgcggccacttccgcgctccctggggagcttacaagcgcgggcggactgccaccgccgccgccgtgcgcaccaccgttgacgacgtcatcgactcggtggtcgccgacgcgcgcaactatacccccgccccctccaccgtggacgcggtcatcgacagcgtggtggccgacgcgcgcgactatgccagacgcaagagccggcggcgacggatcgccaggcgccaccggagtacgcccgccatgcgcgccgcccgggctctgctgcgccgcgccagacgcacgggccgccgggccatgatgcgagccgcgcgccgcgccgccactgcacccacccccgcaggcaggactcgcagacgagcggccgccgccgccgccgcggccatctctagcatgaccagacccaggcgcggaaacgtgtactgggtgcgcgactccgtcacgggcgtgcgcgtgcccgtgcgcacccgtcctcctcgtccctgatctaatgcttgtgtcctcccccgcaagcgacgatgtcaaagcgcaaaatcaaggaggagatgctccaggtcgtcgccccggagatttacggaccaccccaggcggaccagaaaccccgcaaaatcaagcgggttaaaaaaaaggatgaggtggacgagggggcagtagagtttgtgcgcgagttcgctccgcggcggcgcgtaaattggaaggggcgcagggtgcagcgcgtgttgcggcccggcacggcggtggtgttcacgcccggcgagcggtcctcggtcaggagcaagcgtagctatgacgaggtgtacggcgacgacgacatcctggaccaggcggcggagcgggcgggcgagtttgcctacgggaagcggtcgcgcgaagaggagctgatctcgctgccgctggacgaaagcaaccccacgccgagcctgaagcccgtgaccctgcagcaggtgctgccccaggcggtgctgctgccgagccgcggggtcaagcgcgagggcgaaaacatgtatccgaccatgcagatcatggtgcctaagcgcaggcgcgtggaggacgtgctggacaccgtgaaaatggatgtggagcccgaggtcaaggtgcgccccatcaagcaggtggcgccgggcctgggcgtgcagaccgtggacattcagatccccaccgacatggatgtcgacaaaaaaccctcgaccagcatcgaggtgcagaccgacccctggctcccagcctccaccgctaccgtctccacttctaccgccgccacggccaccgagcctcccaggaggcgaagatggggccccgccaaccggctgatgcccaactacgtgttgcatccttccatcatcccaacgccgggctaccgcggcacccggtactacgccagccgcagacgcccagccagcaaacgccgccgccgcaccacccgccgccgtctggcccccgcccgcgtgcgccgcgtaaccacgcgccggggccgctcgctcgttctgcccaccgtgcgctaccaccccagcatcctttaatccgtgtgctgtgatactgttgcagagagatggctctcacttgccgcctgcgcatccccgtcccgaattaccgaggaagatcccgccgcaggagaggcatggcaggcagcggcctgaaccgccgccggcggcgggccatgcgcaggcgcctgagtggcggctttctgcccgcgctcatccccataatcgccgcggccatcggcacgatcccgggcatagcttccgttgcgctgcaggcgtcgcagcgccgttgatgtgcgaataaagcctctttagactctgacacacctggtcctgtatatttttagaatggaagacatcaattttgcgtccctggctccgcggcacggcacgcggccgttcatgggcacctggaacgagatcggcaccagccagctgaacgggggcgccttcaattggagcagtgtctggagcgggcttaaaaatttcggctcgacgctccggacctatgggaacaaggcctggaatagtagcactgggcagttgttaagagaaaagctcaaagatcaaaacttccagcagaaggtggtggacgggctggcctctggcattaacggggtggtggacatcgcgaaccaggccgtgcagcgcgaaataaacagccgcctggacccgcggccgcccacggtggtggagatggaagatgcaactcctccgccgcccaagggcgagaagcggccgcggccagatgcggaggagacgatcctgcaggtggacgagccgccctcgtacgaggaggccgttaaggccggcatgccgaccacgcgcatcatcgcaccgctggccacgggtgtaatgaaacccgccacccttgatctgcctccaccacccacgcccgctccaccgaaggcagctccggttgtgcagccccctccggtggcgaccgccgtgcgccgcgtccccgcccgccgccaggcccagaactggcagagcacgctgcacagtatcgtgggcctgggagtgaaaagtctgaagcgccgccgatgctattgagagagaggaaagaggacactaaagggagagcttaacttgtatgtgccttaccgccagagaacgcgcgaagatggccaccccctcgatgatgccgcagtgggcgtacatgcacatcgccgggcaggacgcctcggagtacctgagcccgggtttggtgcagtttgcccgcgccaccgacacgtacttcagcctgggcaacaagtttaggaaccccacggtggctcccacccacgatgtgaccacggaccggtcccagcgtctgacgctgcgctttgtgcccgtggatcgcgaggacaccacgtactcgtacaaggcgcgcttcactctggccgtgggcgacaaccgggtgctagacatggccagcacttactttgacatccgcggcgtcctggaccgcggtcccagcttcaaaccctactcgggcacggcctacaacagcctggctcccaagggcgcccccaactccagtcagtggcttgcaaaagataccaatgctgctggtcaaccagataaaactcacacctatggcgttgcagccatgggtggagaagacattacagaaaagggtcttcaaattggcattgatgaaactaaagaagaaaataacaagatatttgccaatgaaatataccaaccagaacctcaagtgggagaagaaaactggcaggaaacatttgttttttatggcggtagagctcttaagaaggataccaaaatgaaaccatgctatggctcatttgccagacctactaatgaaaagggaggtcaggctaaatttgtacttgatcaggaaggaaagccaactaaaaatcatgacatcacaatggctttctttgatactcctggtgggcaattaaatggaaaagatgaacttaaggcagacattgtcatgtacactgaaaatgtcaacctggaaacacctgacacccatgttgtttacaaacctggaaaagaggatgacagttcagaaatcaatttggttcaacagtccatgcccaacagacccaactacattggcttcagggacaactttgtagggcttatgtattacaacagcactggcaacatgggtgtgctggcaggtcaggcctctcagttgaatgctgtggtagacttgcaagacagaaacacagagctgtcttaccagctcttgctagattcgctgggtgacagaaccagatactttagcatgtggaactctgcggtggacagctatgatccagatgtcaggatcattgagaatcatggtgtggaagatgaacttccaaactattgcttcccattggatggtgctggaactaatgcagtttaccaaggtgtaaaaattacagatggaaatgatggcgatgtcaatgatgactgggaaaaagacaccgcagtatctgaacgtaatcagatatgcaaaggcaatatctatgctatggagatcaacctccaggccaacctgtggaagagttttctgtactcgaacgtggccctgtacctgcccgactcctacaagtacacgccggccaacgtcacgctgcccgccaacaccaacacctacgagtacatgaacggccgcgtggtagccccctcgctagtggacgcctacatcaacatcggcgcccgctggtcgctagaccccatggacaatgtcaaccccttcaaccaccaccgcaatgcgggcctgcgctaccgttccatgcttctgggcaatggccgctacgtgcccttccacatccaagtgccccaaaagttctttgccatcaagaacctgctcctgctccccggctcttacacctacgagtggaactttcgcaaggacgtcaacatgatcctgcagagttccctcggaaacgacctgcgcgtcgacggcgcctccgtccgcttcgacagcgtcaacctctacgccaccttcttccccatggcgcacaataccgcctccaccctggaagccatgctgcgcaacgacaccaacgaccagtccttcaacgactacctctcggcagccaacatgctttaccccatcccggccaaggccaccaacgtgcccatttccatcccctcgcgcaactgggccgccttccgcggctggagtttcacccggctcaagaccaaggaaactccatcccttggctcgggtttcgacccctactttgtctactcgggctccatcccctacctcgacgggaccttctacctcaaccacaccttcaaaaaggtctccatcatgtttgactcctcggtcagctggcccggcaacgaccggctgctcacgccgaacgagttcgagatcaagcgcagcgtcgacggggagggctacaacgtggcccaatgcaacatgaccaaggactggttcctcgtccagatgctctcccattacaacatcggttaccagggcttccatgtgcccgagggctacaaggaccgcatgtactccttcttccgcaacttccagcccatgagcaggcaggtggtcgatgagatcaactacaaggactacaaggccgtcaccctgccattccagcacaacaactctggcttcaccggctacctcgcacccaccatgcgtcaggggcagccctaccccgccaacttcccctacccgctcatcggccagacagccgtgccatccgtcacccagaaaaagttcctctgcgacagagtcatgtggcgcatccccttctccagcaacttcatgtccatgggcgcccttaccgacctgggtcagaacatgctctacgccaactcggcccacgcgctcgacatgacctttgaggtggaccccatggatgagcccaccctcctctatcttctcttcgaagttttcgacgtggtcagagtgcaccagccgcaccgcggcgtcatcgaggccgtctacctgcgcacgcccttctccgccggcaacgccaccacctaagcatgagcggctccagcgaacgagagctcgcggccatcgtgcgcgacctgggctgcgggccctactttttgggcacccacgacaagcgcttcccgggctttctcgccggcgacaagctggcctgcgccatcgtcaacacggccggccgcgagaccggaggcgtgcactggctcgcctttggctggaacccgcgctcgcgcacctgctacatgttcgacccctttgggttctcggaccgccggctgaagcagatttacagcttcgagtacgaggccatgctacgccgcagcgccctggcctcctcgcccgaccgctgtctcagcctcgagcagtccacccagaccgtgcaggggcccgactccgccgcctgcggacttttctgttgcatgttcttgcatgccttcgtgcactggcccgaccgacccatggacggaaaccccaccatgaacttgctgacgggggtgcccaacggcatgctacaatcgccacaggtgctacccaccctccggcgcaaccaggaggagctctaccgcttcctcgcgcgccactccccttactttcgatcccaccgcgccgccatcgaacacgccaccgcttttgataaaatgaaacaactgcgtgtatctcaataaacagcacttttattttacatgcactggagtatatgcaagttatttaaaagtcaaaggggttctcgcgctcgtcgttgtgcgccgcgctggggagggccacgttgcggtactggtacttgggctgccacttgaactcggggatcaccagtttgggcactggggtctcggggaaggtctcgctccacatgcgccggctcatctgcagggcgcccagcatgtccgggccggagatcttgaaatcgcagttggggccggtgttttgcgcgcgcgagttgcggtacacggggttgcagcactggaacaccatcagactggggtacttcacactggcaagcacgctcttgtcgctgatctgatccttgtccaggtcctcggcgttgctgaggccgaacggggtcatcttgcacagctggcggcccaggaagggcacgctctgaggcttgtggttacactcgcagtgaacgggcattagcatcattcccgcgccgcgctgcatattcgggtagagggccttgacaaaggccgcgatctgcttgaaagcttgctgggccttggccccctcgctgaaaaacaggccgcagctcttcccgctgaactggttattcccgcatccggcatcctgcacgcagcagcgcgcgtcatggctggtcagttgcaccacgctccgtccccagcggttctgggtcaccttggccttgctgggttgctccttcagcgcgcgctgcccgttctcactggttacatccatctccaccacgtggtccttgtgaatcatcaccgttccatgcagacacttgagctggccttccacctcggtgcagccgtgatcccacaggacgcatccggtgcactcccagttcttgtgcgcgatcccgctgtggctgaagatgtaaccttgcaagaggcgacccatgatggtgctaaatgctttctgggtggtgaaggtcagttgcagaccgcgggcctcctcgttcatccaggtctggcacatcttttggaagatctcggtctgctcgggcatgagcttgtaagcatcgcgcaggccgctgtcgacgcggtagcgttccatcagcacgttcatggtatccatgcccttctcccaagacgagaccagaggcagactcagggggttgcgcacgtttaggacaccgggggtcgctggctcgacgatgcgttttccgtccttgccttccttcaacagaaccggcggctggctgaatcccactcccacgatcacggcatcttcctggggcatctcttcgtcggggtctaccttggtcacatgcttggtctttctgggctgcttcttttttggagggctgtccacggggaccacgtcctcctcggaagacccggagcccacccgctgatactttcggcgcttggtgggcagaggaggcggcggcgaggggctcctttcctgctccggcggatagcgcgctgaaccgtggccccggggcggagtggcctctcggtccatgaaccggcgcacgtcctgactgccgccggccattgtttcctaggggaagatggaggagcagccgcgtaagcaggagcaggaggaggacttaaccacccacgagcaacctaaaatcgagcaggacctgggcttcgaagagccggctcgtctagaacccccacaggatgaacaggagcacgagcaagacgcaggccaggaggagaccgacgctgggctcgagcatggctacctgggaggagaggaggatgtgctgctgaaacacctgcagcgccagtccctcatcctccgggacgccctagccgaccggagcgaaacccccctcagcgtcgaggagctgtgtcgggcctacgagctcaacctcttctcgccgcgcgtgccccccaaacgccagcccaacggcacatgcgagcccaacccgcgtcttaacttctatcccgtctttgcggtccccgaggccctggccacctatcacatctttttcaagaaccaaaagatccccgtctcctgccgcgccaaccgcacccgcgccgacgcgctcctcgctctggggcccggcgcgcgcatacctgatatcgcttccctggaagaggtgcccaagatcttcgaagggcttggtcgggacgagacgcgcgcggcaaatgctctgaaagaaacagcagaggaagagggtcacactagcgccctggtagagttggaaggcgacaacgccaggctggccgtgctcaagcgcagcgtcgagctcacccacttcgcctaccccgccgtcaacctcccgcccaaggtcatgcgtcgcatcatggatcagctcatcatgccccacatcgaagccctcgatgaaagtcaggagcagcgccccgaggacgcccggcccgtggtcagcgacgagcagctcgcgcgttggctcgggacccgcgacccccaggctttggaacagcggcgcaagctcatgctggccgtggtcctggtcaccctcgagctcgaatgcatgcgccgcttcttcagcgaccccgagaccctgcgcaaggtcgaggagaccctgcactacacttttagacacggtttcgtcaggcaggcatgcaagatctccaacgtggagctgaccaacctggtctcctgcctggggatcctgcatgagaaccgcctggggcagaccgtgctccactctaccctgaagggcgaggcgcggcgggactatgtccgcgactgcgtctttctctttctctgccacacatggcagtcggccatgggagtgtggcagcagtgtctcgaggacgagaacctgaaggagctggacaagcttcttgctagaaaccttaaaaagctgtggacgggcttcgacgagcgcaccgtcgcctctgacctggccgagatcgtgttccccgagcgcctgaggcagacgctgaaaggcgggctgcctgacttcatgagccagagcatgttgcaaaattaccgcactttcattctcgagcggtctgggatgctgcccgccacctgcaacgccttcccctccgactttgtcccgctgagctaccgcgagtgtcccccgccgctgtggagccactgctacctcttgcagctggccaactacatcgcctaccactcggacgtgatcgaggacgtgagcggcgaggggctgctcgagtgccactgccgctgcaacctgtgctccccgcaccgctccctggtctgcaacccccagctcctgagcgagacccaggtcatcggtaccttcgagctgcaaggtccgcaggagtccaccgctccgctgaaactcacgccggggttgtggacttccgcgtacctgcgcaaatttgtacccgaggactaccacgcccatgagataaagttcttcgaggaccaatcgcgcccgcagcacgcggatctcacggcctgcgtcatcacccagggcgcgatccttgcccaattgcacgccatccaaaaatcccgccaagagtttcttctgaaaaagggtagaggggtctacctggacccccagacgggcgaggtgctcaacccgggtctcccccagcatgccgaggaagaagcaggagccgctagtggaggagatggaagaagaatgggacagccaggcagaggaggacgaatgggaggaggagacagaggaggaagaattggaagaggtggaagaggagcaggcaacagagcagcccgtcgccgcaccatccgcgccggcagccccgccggtcacggatacaacctccgcagctccggccaagcctcctcgtagatgggatcgagtgaagggtgacggtaagcacgagcggcagggctaccgatcatggagggcccacaaagccgcgatcatcgcctgcttgcaagactgcggggggaacatcgcttttgcccgccgctacctgctcttccaccgcggggtgaacatcccccgcaacgtgttgcattactaccgtcaccttcacagctaagaaaaagcaagtaagaggagtcgccggaggaggcctgaggatcgcggcgaacgagcccttgaccaccagagagctgaggaaccggatcttccccactctttatgccatttttcagcagagtcgaggtcagcagcaagagctcaaagtaaaaaaccggtctctgcgctcgctcacccgcagttgcttgtaccacaaaaacgaagatcagctgcagcgcactctcgaagacgccgaggctctgttccacaagtactgcgcgctcactcttaaagactaaggcgcgcccacccggaaaaaaggcgggaattacctcatcgccaccatgagcaaggagattcccaccccttacatgtggagctatcagccccagatgggcctggccgcgggcgcctcccaggactactccacccgcatgaactggctcagtgccggcccttcgatgatctcacgggtcaacggggtccgtaaccatcgaaaccaaatattgttggaacaggcggcggtcacctccacgcccagggcaaagctcaacccgcgtaattggccctccaccctggtgtatcaggaaatccccgggccgactaccgtactacttccgcgtgacgcactggccgaagtccgcatgactaactcaggtgtccagctggccggcggcgcttcccggtgcccgctccgcccacaatcgggtataaaaaccctggtgatccgaggcagaggcacacagcttaacgacgagttggtgagctcttcgatcggtctgcgaccggacggagtgttccaactagccggagccgggagatcgtccttcactcccaaccaggcctacctgaccttgcagagcagctcttcggagcctcgctccggaggcatcggaaccctccagttcgtggaggagtttgtgccctcggtctacttcaaccccttctcgggatcgccaggcctctacccggacgagttcataccgaacttcgacgcagtgagagaagcggtggacggctacgactgaatgtcccatggtgactcggctgagcttgctcggttgaggcatctggaccactgccgccgcctgcgctgctttgcccgggagagctgcggactcatctactttgagtttcccgaggagcaccccaacggacctgcacacggagtgcggatcaccgtagagggcaccaccgagtctcacctggtcaggttcttcacccagcagcccttcctggtcgagcgggaccggggcgccaccacctacaccgtctactgcatctgtccaaccccgaagttgcatgagaatttttgctgtactctgtgtgctgagtttaataaaagctaaactcctacaatactctgggatcccgtgtcgtcgcactcgcaacgagaccttcaacctcaccaaccagactgaggtaaaactcaactgcaagccaggagataaatatatcctctggctctttgaaaacacttcattcgcagtctccaacacctgcgccaacgacggtattgaaatacccaacaaccttaccagtggactaacttacactaccagaaagactaagctagtactctacaatccttttgtagagggaacctaccactgccagagcggaccttgcttccacactttcactttggtgaacgttaccgacagcagcacagccgctccagaaacatctaaccttctttctgatactaacactcctaaaaccggaggtgagctctgggttccctctctaacagaggggggtaaacatattgaagcggttgggtatttgattttaggggtggtcctgggtgggtgcatagcggtgctgtattaccttccttgctggatcgaaatcaaaatctttatctgctgggtcagacattgttgggaggaaccatgaaggggctcttgctgattatcctttccctggtggggggtgtactgtcatgccacgaacagccacgatgtaacatcaccacaggcaatgagaggagtgtgatatgcacagtagtcatcaaatgcgaacataaatgccctctcaacatcacattcaaaaaccgtaccatggggaatgcatgggtgggcgactgggaaccaggagatgagcagaactacacggtcactgtccatggtagcaatggaaatcacactttcggtttcaaatttatttttgaagttatgtgtgatatcacactgcatgtggctagacttcatggcttgtggccccctaccaaggataacatggttgggttttctttggcttttgtgatcatggcctgtgcaatgtcaggtctgctggtaggggctataatgtggttcctgaggcacaagcccaggtacggaaatctggaaaaggaaaaattgctataaatgtttttctttccacagcatcatgaatacagtgatccgtatcgtgctgctctctcttcttgtagcttttagtcaggcagaatttcatactatcaatgctacatggtgggataatataactttagtgggaccctcagatattccagtcacatggtatgatagcactggattgaaattttgtgatggaagtacagttaagaatccacagatcagacatagttgtaatgaacaaaacttaactctgattcatgtgaacaaaacccatgaaagaacatacatgggctataataaacagagtactcataaggaagactataaagttatagtaatacctcctcctcctcctgctactgtaaagccacaaccagaaccagaatatgtgtttatttatattggagacaacaaaactctagaaggtcctccaggtcctccagtcacttggtttaatcaggatggaaagaaattttgcgaaggggaaagagtttatcatccagaatacaatcacacatgtgacaaacaaaaccttatactgctgtttgtaaattttacacatgatggagcttatcttggttacaattatcaaggaactcaaaggacacagtatgaggttacagtcttagatctttttccaaactctggtcaaatgaaaattgaagaacatagtgaggaaacagaacaaaagaatgggcaaaagcaaaatgaagaacaaaaacatggtgatcaaaaaacaagtcaaacaaaagttaatgacaggcgaaaagcagcgcagaaaagaccatcaaagctaaaaccagcaactattgagacaatgcttgttacagtaactgctggttctaacttaactttagttgggcctaaaccagaaggaaaagttacttggttcgatggagatttaaaaagaccatgtgagcctaattatagactgagacatgaatgtaatactcaaaacttaactctaatcaatgtaactaaaggttatgagggaacttactatggtactaatgacaaagatgaaggcaaaaggtacagagtgaaagtaaatactacaaattctcaagctgtaaaaattcagccatataccagacctactactcctgatcagaatcacaaatttgaaatgcaaattgaaaatggaaatgacgaatcaaaaataccctcaactactgtggcaattgtggtgggtgtgattgcgggcttcataactctaatcattgtctttatatgctacatctgctgccgcaagcgtcccaggtcatacaatcatatggtagacccactactcagcttctcttactgaaactcagttactctcatttcagaaccatgaaggctttcacagcttgcgttctgattagtttagtcacacttagtctatctcaaattatcaatgttaatgttaccagaggtggtagcatcacattaaatggaacctatccgcaaactacatggacaagatatcacacaaatggatggaaaaaaatatgtgaatggaatgttacagcctataaatgcttcagtaatggaagcattacaattactgccactgctaatattacttctggcaaaatcaaggcagaaagctataaaaatgaaattaagaaaatggtatataggaataacaagacaacatttgaagattctggagattatgaatatcagaaattatctttttatatgctaacaattattgagcttccaactactaaggctcccaccacaattaggacaactgttgagaccactactcacactacgcagttagacactacagtacagaatagtactgtattggttaggtttttgttgagggaggaaagtactactgaacagacagaggctacctcaagtgccttcagcagcactgcaaatttaacttcgcttgcttggactaatgaaaccggagtatcattgatgcatggccagccttactcaggtttggatattcaaattacttttctggttgtctgtggaatctttattcttgtggttcttctgtactttgtctgctgcaaagccagagagaaatctaggaggcccatctacaggccagtgattggggaacctcagcccctccaagtggatggaggcttaagaaatcttctcttctcttttacagtatggtgatcggccatgattcctaggttcttcctatttaacatcctcttctgtctattcaacatctgcgctgccttcgcggccgtctcgcacgcctcgcccgactgtctagggcctttccccacctacctcctatttgccctgctcacctgcacctgcgtctgcagcattgtctgcgtggtcatcaccttcctgcagctcatcgactggtgctgcgcgcgctacaattacctgcatcatagtcccgaatacagggacgagaacgtagccagaatcttaaggctcatctgaccatgcagactctgctcatactgctagccctcctatcccctgtcctcacaacttatgctgattactctaaatgcaaattcgcggacatatggaatttcttagattgctatcaggagaaaattgatatgccatcctattacttggtgattgtgggaatagtcatggtctgctcctgcactttctttgccatcatgatctacccctgttttgatctcggttggaactctgttgaggcattcacatacacactagaaagcagttcactagcctccacgccaccacccacaccgcctccccgcagaaatcagtttcccatgattcagtacttagaagagccccctccccggcccccttccactgttagctactttcacataaccggcggcgatgactgaccaccacctggacctcgagatggacggccaggcctccgagcagcgcatcctgcaactgcgcgtccgtcagcagcaggagcgggccgccaaggagctcctcgatgccatcaacatccaccagtgcaagaagggcatcttctgcctggtcaaacaggcaaagatcacctacgagctcgtgtccggcggcaagcagcatcgcctcgcctatgagctgccccagcagaagcagaagttcacctgcatggtgggcgtcaaccccatagtcatcacccagcagtcgggcgagaccagcggctgcatccactgctcctgcgaaagccccgagtgcatctactccctgctcaagaccctttgcggactccgcgacctcctccccatgaactgatgttaattaaaagcccaaaaaccaatcagccccttcccccatttccaatcccccaattactcataaaaataaatcattggaactaatcattcaataaagatcactcacttgaaatctgaaagtatgtctctggtgtagttgttcagcagcacctcggtgccctcctcccagctctggtactccagtccccggcgggcggcaaacttcctccacaccttgaaagggatgtcaaattcttggtccacaattttcattgtcttccctctcagatgtcaaagaggctccgggtggaagatgacttcaaccccgtctacccctatggccacgcgcggaatcagaatatccccttcctcactcccccctttgtctcctccgatggattacaaaacttcccccctggtgtcctttcgctaaaactggctgatccaatcgccattgtcaatgggaatgtttcactcaaggtgggagggggaatcactgtggaacaagatagtggacagctaattgcgaatcctaaggctcccttgcaagttgcaaatgacaaattagagctttcttatgcatatccatttgaaactagtgctaataaacttagtttaaaagtagggcaaggactaaaagtgttggatgaaaaagattctggaggattgcaaaatttacttggcaaacttgtagttttaactggaaaaggaataggtgttgaagagttaaaaaaccctgataatactaataggggagttggaattaatgtaagactgggcaaagatggaggtttgtcctttaataaaaatggtgagttagtagcgtggaacaaacacaatgacacacgcactctttggacaactccagacccttctccaaattgtaaaattgaggaagttaaagactcaaaacttactttggttcttacaaaatgcggaagtcagatattggctactatggcttttcaagttgtgaagggaacttatgaaaatatcagtaagaacacagcaaaaaatagcttctcaattaaattgttatttgatgataatggaaaacttttagaaggatctagtttagataaagattattggaacttcagaagtgatgattctattatacccaatcaatacgacaatgcagtgccgtttatgccaaacctaaaagcttatcctaaaccttcaactgtcttgccatctactgacaaaaatagtaatgggaaaaatactattgtttctaacctttatctggaaggaaaggcatatcagccagttgcggttaccattacttttaacaaagagattggctgtacttattcaataacatttgactttggatgggctaaaacctatgatgttccaattccatttgattcttcctcatttaccttctcctatattgcccaagaaaacaaagacacgaacaaataaaatgtttttgaaatgaattatgtatctttattgatttttacaccagcacgggtagtcagtctcccaccaccagcccatttcacagtgtacacggttctctcagcacgggtggccttaaatagggaaatgttctgattagtgcgggaactggacttggggtctataatccacacagtttcctggcgagccaaacgggggtcggtaattgagatgaagccgtcctctgaaaagtcatccaagcgggcctcacagtccaaggtcacagtctggtggaacgagaagaacgcacagattcatactcggaaaacaggatgggtctgtgcctctccatcagcgcccttagcagtctctgccgccggggctcggtgcggctgctgcagatgggatcgggatcgcaagtctctttgactatgatccccacagcctttagcatcagtctcctggtgcgtcgggcacagcaccgcatcctgatctctgccatgttctcacagtaagtgcagcacataatcaccatgttattcagcagcccataattcagggtgctccagccaaagctcatgttggggatgatggaacccacgtgaccgtcgtaccagatgcggcagtatatcaggtgcctgcccctcataaacacactgcccatatacatgatctctttgggcatgtctctgttcacaatctgacggtaccatgggaaacgctggttgaacatgcacccgtaaatgactctcctgaaccacacggccagcagggtgcctcccgcccgacactgcagagagcccggggatgaacagtggcaatgcaggatccagcgctcgtacccgctcaccatctgagctcttaccaagtccagggtagcggggcacaggcacactgacatacatctttttaaaatttttatttcctctggggtcaggatcatatcccaggggactggaaactcttggagcagggtaaagccagcagcacatggtaatccacggacagaacttacattatgataatctgcatgatcacaatcgggcaacaggggatgttgttcagtcagtgaagccctggtctcctcatcagatcgtggtaaacgggccctgcgatatggatgatggcggagcgagctggattgaatctcggtttgcattgtagtggattctcttgcgtaccttgtcgtacttctgccagcagaaatgggcccttgaacagcagatacccctcctgcggccgtcctttcgctgctgccgctcagtcatccaactgaagtacatccattctcgaagattctgaagaagttcctctgcatctgatgaaataaaaaacccgtccatgcgaattcccctcatcacatcagccaggactctgtaggccatccccatccagttaatgctgccttgtctatcattcagagggggcggtggcaggattggaagaaccatttttattccaagcggtctcgaaggacgataaagtgcaagtcacgcaggtgacagcgttccccgccgctgtgctggtggaaacatacagccagatcaaaacccactctattttcaaggtgctcgactgtggcttcgagcagtggctctacgcgtacatccaacataagaatcacattaaaggctggccctccatcgatttcatcaatcatcaggttacattcctgcaccatccccaggtaattctcatttttccagccttggattatttctacaaattgttgatgtaagtccactccgcacatgtggaaaagctcccacagtgccccctccactttcataatcaggcagaccttcataatagaaacagatcctgctgctccaccacctgcagcgtgttcaaaacaacaagattcaataaggttctgccctccgccctgagctcacgcctcaatgtcagctgcaaaaagtcacttaagtcctgggccactacagctgacaattcagagccagggctaagcgtgggactggcaagcgtgagggaaaactttaatgctccaaagctagcacccaaaaactgcatgctggaataagctctctttgtgtctccggtgatgccttccaaaatgtaagtgataaagcgtggtagtttttctttaatcatttgcgtaatagaaaagtcctctaaataagtcactaggaccccagggaccacaatgtggtagcttacaccgcgtcgctgaagcatggttagtagagatgagagtctgaaaaacagaaagcatgcactaaactaaggtggctattttcactgaaggaaaaatcactctctccagcagcagggtacccactgggtggcccttgcgaacatacaaaaatcggtccgtgtgattaaagagcagcacagtaagctcctgtcttctcccggcaaagatcacatcggactgggttagtatgtccctggcatggtagtcattcaaggccataaatctgccctgatatccagtaggaaccagcacactcacttttaggtgaagcaataccaccccatgcggaggaatgtggaaagattgagggcaaaagaaattatatctattgctagtcccttcctggacgggagcaatccctccagggctatctatgaaagcatacagagattcagccatagctcagcccgcttaccagtagacagagagcacagcagtacaagcgccaacagcagcgactgactacccactgacctagctccctatttaaaggcaccttacactgacgtaatgaccaaaggtctaaaaaccccgccaaaaaaaacacacacgccctgggtgttttttgcgaaaacacttccgcgttctcacttcctcgtatcgatttcgtgactcaacttccgggttcccacgttacgtcacttctgcccttacatataactcaatcgtagggcgccatcttgcccacgtccaaaatggcttccatgtccagccacgcctccgcggcggccgtcggccgtgcgtcgtgacgtcactaacggttcttgcaacggccaatcagcgtcggccccgccctaaattcaaaagctcatttacatattaacttttgtttactttgtggggtatattattgatgatg

SEQ ID NO: 24 - DNA, 35727 bp, Adenovirus D24
  MISC_FEATURE (1)..(35727): Complete Genome
catcatcaataatataccccacaaagtaaacaaaagttaacatgcaaatgagcttttgaatttagggcggggccagcgctgattggacgagagaagatgatgcaaatgacgtcacgacgcacggctaacggtcgccgcggaggcgtggcctagcccggaagcaagtcgcggggctgatgacgtataaaaaagcggactttagacccggaaacggccgattttcccgcggccacgcccggatatgaggtaattctgggcggatgcaagtaaaattaggtcattttggcgcgaaaactgaatgaggaagtgaaaagtgaaaaataccggtcccgcccagggcggaatatttaccgagggccgagagactttgaccgattacgtgggggtttcgattgcggtgttttttcgcgaatttccgcgtccgtgtcaaagtccggtgtttatgtcacagatcagctgatccacagggtatttaaaccagtcgagcccgtcaagaggccactcttgagtgccagcgagtagagatttctctgagctccgctcccagagtctgagaaaaatgagacacctgcgcctcctttcttcaactgtgcctattgacatggccgcattattgctggaggattatgtgagtacaatattggaggacgaactgcatccatctccatttgagctgggacctacacttcaggacctatatgatttggaggtagatgcccatgatgacgacccgaacgaagaggctgtgaatttaatatttccagaatctctgattcttcaggctgacatagccagcgaagctgtacctacaccacttcatacaccgactctgtcacccatacctgaattggaagaggaggacgagctagacctccgatgttatgaggaaggttttcctcccagcgattcagaggacgaacagggtgagcagagcatggctctaatctcaaaatatgcttgtgtggttgtggaagagcattttgtgttggacaatcctgaggtgcccgggcaaggctgtagatcctgccagtaccaccgggataagaccggagacacgaacgcctcctgcgctctgtgttacatgaaaaagaacttcagctttatttacagtaagtggagtgaatgtgagagagactgagtgcttaacacataactgggtaatgcttaaacagctgtgctaagtgtggtttatttttgtttctaggtccggtgtcagaggatgagtcatcaccctcagaagaagaccacccgtgtccccctgagctgtcaggcgaaacgcccctgcaagtgcacagacccaccccagtcagacccagtggcgagaggcgagcagctgttgaaaaaattgaggacttgttacatgacatgggtggggatgaacctttggacctgagcttgaaacgccccaggaactaggctcagctgtgcttagtcatgtgtaaataaagttgtacaataaaagtatatgtgacgcatgcaaggtgtggtttatgactcatgggcgtggcttagtcctatataagtggcaacacctgggcactggggcacagaccttcagggagttcctgatggatgtgtggactatccttgcagactttagcaagacacgccggcttgtagaggatagttcagacgggtgctccgggttctggagacactggtttggaactcctctatctcgtctggtgtacacagttaagaaggattataacgaggaatttgaaaatctttttgctgattgctctggcctgctagattctctaaatctcggccaccagtcccttttccaggaaagggtactccacagccttgatttttcaagcccagggcgcactacagccggggttgcttttgtggtttttctggttgacaaatggagccagaacacccaactgagcaggggctacattctggacttcgcagccatgcacctgtggagggcatgggtgaggcagcggggacagagaatcttgaactactggcttatacagccagcagctccgggtcttcttcgtctacacagacaaacatccatgttggaggaagaaatgaggcaggccatggacgagaacccgaggagcggcctggaccctccgtcggaagaggagctggattgaatcaggtatccagcctgtacccagagcttagcagggtgctgacatccatggccaggggagtgaagagggagaggagcgatgggggcaataccgggatgatgaccgagctgacggccagcctgatgaatcgcaagcgtccagagcgcattacctggcacgagctacagatggagtgtagggatgaggtgggcctgatgcaggataaatatggcctggagcagataaaaacccactggttgaacccagatgaggattgggaggaggccattaagaaatatgccaagatagccctgcgcccagattgcaagtacagggtgaccaagacggtgaatatcagacatgcctgctacatctcggggaacggggcagaggtggtcatcgataccctggacaaggccgccttcaggtgttgcatgatgggaatgagagccggagtgatgaatatgaattccatgattttcatgaacatgaagttcaatggagagaagtttaatggggtgatgttcatggccaacagtcacatgaccctgcacggctgcagtttcttcggcttcaacaatatgtgcgcagaggtctggggcgctgctaagatcaggggatgtaagttttatggctgctggatgggcgtggtcggaagacccaagagcgagatgtctgtgaagcagtgtgtgtttgagaaatgctacctgggagtctctaccgagggcaatgctagagtgagacattgctcttccctggagacgggctgcttctgcctggtgaagggcacagcctctctgaagcataatatggtgaagggctgcacggatgagcgcatgtacaacatgctgacatgcgactcgggggtctgccatatcctgaagaacatccatgtgacctcccacccccggaagaagtggccagtgtttgagaataacctactgatcaagtgccacatgcacctgggcgccagaaggggcaccttccagccgtaccagtgcaactttagccagaccaagctgctgctggagaacgatgccttctccagggtgaacctgaacggcatctttgacatggatgtctcggtgtacaagatcctgagatacgatgagaccaagtccagggtgcgcgcttgcgagtgcgggggcagacacaccaggatgcaaccagtggccctggatgtgaccgaggagctgaggcccgaccacctggtgatggcttgtaccgggaccgagttcagctccagtggggaggacacagattagaggtaggttgagtattagtgggcgtggctaaggtgactataaaggcgggtgtcttacgagggtctttttgcttttctgcagacatcatgaacgggactggcggggccttcgaaggggggctttttagcccttatttgacaacccgcctgccgggatgggccggagttcgtcagaatgtgatgggatcgacggtggacgggcgtccagtgcttccagcaaattcctcgaccatgacctacgcgaccgtggggaactcgtcgctcgacagcaccgccgcagccgcggcagccgcagccgccatgacagcgacgagactggcttcgagctacatgcccagcagcagcagtagcccctctgtgcccagttccatcatcgccgaggagaaactgctggccctgctggccgagctggaagccctgagccgccagctggccgccctgacccagcaggtgtccgagctccgcgaacagcagcagcagcaaaataaatgattcaataaacacagattctgattcaaacagcaaagcatctttattatttattttttcgcgcgcggtaggccctggtccacctctcccgatcattgagagtgcggtggattttttccaggacccggtagaggtgggattggatgttgaggtacatgggcatgagcccgtcccgggggtggaggtagcaccactgcatggcctcgtgctctggggtcgtgttgtagatgatccagtcatagcaggggcgctgggcgtggtgctggatgatgtccttgaggaggagactgatggccacggggagccccttggtgtaggtgttggcgaagcggttgagctgggagggatgcatgcggggggagatgatgtggagtttggcctggatcttgaggttggcgatgttgccacccagatcccgcctggggttcatgttgtgcaggaccaccagaacggtgtagcccgtgcacttggggaacttgtcatgcaacttggaagggaatgcgtgaaagaatttggagacgcccttgtgcccacccaggttttccatgcactcatccatgatgatggcgatgggcccgtgggctgcggctttggcaaagacgtttctggggtcagagacatcgtaattatgctcctgggtgagatcatcataagacattttaatgaatttggggcggagggtgccagattgggggacaatggttccctcgggccccggggcgaagttcccctcacatatttgcatctcccaggctttcatctcggagggggggatcatgtccacctgcggggcgatgaaaaaaacggtttccggggcgggggtgatgagctgcgaggagagcaggtttctcaacagctgggacttgccgcacccggtcgggccgtagatgaccccgatgacgggttgcaggtggtagttcaaggacatgcagctgccgtcgtcccggaggaggggggccacctcgttgagcatgtctctgacttggaggttttcccggacgagctcgccgaggaggcggtccccgcccagcgagagcagctcttgcagggaagcaaagtttttcaggggcttgagcccgtcggccatgggcatcttggcgagggtctgcgagaggagttcgaggcggtcccagagctcggtgacgtgctctacggcatctcgatccagcagacttcctcgtttcgggggttgggacgactgcgactgtagggcacgagacgatgggcgtccagcgctgccagcgtcatgtccttccagggtctcagtgtccgcgtgagcgtggtctccgtcacggtgaaggggtgggccccgggctgtgcgcttgcaagggtgcgcttgagactcatcctgctggtgctgaaacgggcacggtcttcgccctgcgcgtcggcgagatagcagttgaccatgagctcgtagttgagggcctcggcggcgtggcccttggcgcggagcttgcccttggaagagcgcccgcaggcgggacagaggagggattgcagggcgtagagcttgggtgcgagaaagacggactcgggggcgaaagcatccgctccgcagtgggcgcagacggtctcgcactcgaccagccaggtgagctcgggctgctcggggtcaaaaaccagttttcccccgttctttttgatgcgcttcttacctcgcgtctccatgagtctgtgtccgcgctcggtgacaaacaggctgtctgtgtccccgtagacggacttgatgggcctgtcctgcaggggcgtcccgcggtcctcctcgtagagaaactcggaccactctgagacgaaggcgcgcgtccacgccaagacaaaggaggccacgtgcgaggggtagcggtcgttgtccaccagggggtccaccttttccacggtatgcagacacatgtccccctcctccgcatccaagaaggtgattggcttgtaggtgtaggccacgtgacccggggtccccgacgggggggtataaaagggggcgggtctgtgctcgtcctcactctcttccgcgtcgctgtccacgagcgccagctgttggggtaggtattccctttcgagagcgggcatgacctcggcactcaggttgtcagtttctagaaacgaggaggatttgatgttggcttgccctgccgcaatgctttttaggagactttcatccatctggtcagaaaagactatttttttattgtcaagcttggtggcgaaggagccatagagggcgttggagagaagcttggcgatggatctcatggtctgatttttgtcacggtcggctcgctccttggccgcgatgttgagctggacatactcgcgcgcgacgcacttccattcggggaagacggtggtgcgctcgtcgggcacgatcctgacgcgccagccgcggttatgcagggtgaccagatccacgctggtggccacctcgccgcgcaggggctcgttggtccagcagaggcgtccgcccttgcgcgagcagaacgggggcagcacatcaagcagatgctcgtcaggggggtccgcatcgatggtgaagatgcccggacagagttccttgtcaaaataatcgatttttgaggatgcatcatccaaggccatctgccactcgcgggcggccagcgctcgctcgtaggggttgaggggcggaccccagggcatgggatgcgtcagggcggaggcgtacatgccgcagatgtcgtagacatagatgggctccgagaggatgccgatgtaggtgggataacagcgccccccgcggatgctggcgcgcacgtagtcatacaactcgtgcgagggggccaagaaggcggggccgagattggtgcgctggggctgctcggcgcggaagacgatctggcgaaagatggcatgcgagttggaggagatggtgggccgttggaagatgttaaagtgggcatgaggcagacgaaccgagtcgcggatgaagtgcgcgtaggagtcttgcagcttggcgacgagctcggcggtgacgaggacgtccatggcgcagtagtccagcgtttcgcggatgatgtcataacccgcctctcctttcttctcccatagctcgcggttgagggcgtactcctcgtcatccttccagtactcccggagcgggaatcctcgatcgtccgcacggtaagagcccagcatgtagaaatggttcacggccttgtagggacagcagcccttctccacggggagggcgtaagcttgagcggccttgcggagcgaggtgtgcgtcagggcgaaggtatccctgaccatgactttcaagaactggtacttgaaatccgagtcgtcgcagccgccgtgctcccagagctcgaaatcggtgcgcttcttcgagagggggttaggcagagcgaaagtgacgtcattgaagagaatcttgcctgcccgcggcatgaaattgcgggtgatgcggaaagggcccgggacggaggctcggttgttgatgacctgggcggcgaggacgatctcgtcgaagccgttgatgttgtgcccgacgatgtagagttccatgaatcgcgggcggcctttaatgtgcggcagctttttgagctcctcgtaggtgaggtcctcggggcaatgcagtccgtgctgctcgagcgcccactcctggagatgtgggttggcttgcatgaatgaagcccagagctcgcgggccataagggtctggagctcgtcgcgaaagaggcggaactgctggcccacggccatcttttctggggtgacgcagtagaaagtaagggggtcccgctcccagcgatcccagcgtaagcgcacggctagatcgcgagcgagggcgaccagctctgggtcccccgagaatttcataaccagcataaaggggacgagctgcttgccgaaggaccccatccaggtgtaggtttctacatcgtaggtgacaaagagccgctccgtgcgaggatgagagccgattgggaagaactggatttcctgccaccagttggacgagtggctgttgatgtgatgaaagtagaaatcccgccggcgaaccgagcactcgtgctgatgcttgtaaaagcgtccgcagtactcgcagcgctgcacgggctgtacctcatccacgagatacacagcgcgtcccttgaggaggaacttcaggagtggcggccctggctggtggttttcatgttcgcctgcgtgggactcaccctggggctcctcgaggacggagaggctgacgagcccgcgcgggagccaggtccagatctcggcgcggcgggggcggagagcgaagacgagggcgcgcagttgggagctgtccatggtgtcgcggagatccaggtccgggggcagggttctgaggttgacctcgtagaggcgggtgagggcgtgcttgagatgcagatggtacttgatctccacgggtgagttggtggctgtgtccacgcattgcatgagcccgtagctgcgcggggccacgaccgtgccgcggtgcgcttttagaagcggtgtcgcggacgcgctcccggcggcagcggcggttccggccccgcgggcaggggcggcagaggcacgtcggcgtggcgctcgggcaggtcccggtgctgcgccctgagagcgctggcgtgcgcgacgacgcggcggttgacatcctggatctgccgcctctgcgtgaagaccaccggccccgtgactttgaacctgaaagacagttcaacagaatcaatctcggcgtcattgacggcggcctgacgcaggatctcttgcacgtcgcccgagttgtcctggtaggcgatctcggacatgaactgctcgatctcctcctcctggagatcgccgcggcccgcgcgctccacggtggcggcgaggtcattggagatgcgacccatgagctgcgagaaggcgcccaggccgctctcattccagacgcggctgtagaccacgtccccgtcggcgtcgcgcgcgcgcatgaccacctgcgcgaggttgagctccacgtgccgcgtgaagacggcgtagttgcgcaggcgctggaagaggtagtttagggtggtggcgatgtgctcggtgacgaagaagtacatgatccagcggcgcaggggcatctcgctgatgtcgccgatggcctccagcctttccatggcctcgtagaaatccacagcgaagttgaaaaactgggcgttgcgggccgagaccgtgagctcgtcctccaggagcctgatgagttcggcgatggtggcgcgcacctcgcgctcgaaatccccgggggcctcctcctcttcctcttcttccatgacgacctcttcttctatttcttcctctgggggcggtggtggtggcggggcccgacgacgacggcgacgcaccgggagacggtcgacgaagcgctcgatcatctccccgcggcggcgacgcatggtttcggtgacggcgcgaccccgttcgcgaggacgcagcgtgaagacgccgccggtcatctcccggtaatggggcgggtccccgttgggcagcgagagggcgctgacgatgcatcttatcaattgcggtgtaggggacgtgagcgcgtcgagatcgaccggatcggagaatctttcgaggaaagcgtctagccaatcgcagtcgcaaggtaagctcaaacacgtagcagccctgtggacgctgttagaattgcggttgctgatgatgtaattgaagtaggcgtttttaaggcggcggatggtggcgaggaggaccaggtccttgggtcccgcttgctggatgcgaagccgctcggccatgccccaggcctggccctgacaccggctcaggttcttgtagtagtcatgcatgagcctctcaatgtcatcactggcggaggcggagtcttccatgcgggtgaccccgacgcccctgagcggctgcacgagcgccaggtcggcgacgacgcgctcggcgaggatggcctgttgcacgcgggtgagggtgtcctggaagtcgtccatgtcgacgaagcggtggtaggccccggtgttgatggtgtaggtgcagttggccatgagcgaccagttgacggtctgcaggccgggttgcacgacctctgagtacctgagccgcgagaaggcgcgcgagtcgaagacatagtcgttgcaggtgcgcacgaggtactggtatccaactaggaagtgcggcggcggctggcggtagagcggccagcgctgggtggccggcgcgcccggggccaggtcctcgagcatgaggcggtggtagccgtagaggtagcgggacatccaggtgatgccggcggcggtggtggaggcgcgcgggaactcgcggacgcggttccagatgttgcgcagcggcaggaaatagtccatggtcggcacggtctggccggtgagacgcgcgcagtcattgacgctctagaggcaaaaacgaaagcggttgagcgggctcttcctccgtagcctggcggaacgcaaacgggttaggccgcgtgtgtaccccggttcgagtcccctcgaatcaggctggagccgcgactaacgtggtattggcactcccgtctcgacccgagcccgatagccgccaggatacggcggagagccctttttgccgaccgaggggagtcgctagacttgaaagcggccgaaaaccccgccgggtagtggctcgcgcccgtagtctggagaagctttgccagggttgagtcgcggcagaacccggttcgcggacggccgcggcgagcgggacttggtcaccccgccgatttaaagacccacagccagccgacttctccagttacgggagcgagcccccttttttctttttgccagatgcatcccgtcctgcgccaaatgcgtcccaccccccctccggcgaccaccgcgaccgcggccgtagcaggcgccggcgctgtagccccgccacagcagacagagatggacttggaagagggcgaagggctggcgagactgggggcgccgtccccggagcgacacccccgcgtgcagctgcagaaggacgtgcgcccggcgtacgtgcctgcgcagaacctgttcagggaccgcagcggggaggagcccgaggagatgcgcgactgccgttttcgggcgggcagggagctgcgcgagggcctggaccgccagcgcgtgctgcgcgacgaggatttcgagccgaacgagcagacggggatcagccccgcgcgcgcgcacgtggcggcggccaacctggtgacggcctacgagcagacggtgaagcaggagcgcaacttccaaaagagtttcaacaaccatgtgcgcacgctaatcgcgcgcgaggaggtggccctgggcttgatgcacctgtgggacctggcggaggccatcgtgcagaacccggacagcaagcctctgacggcgcagctgttcctggtggtgcagcacagcagggacaacgaggcgttcagggaggcgctgctaaacatcgccgagcccgagggccgctggctgctggagctgatcaacatcttgcagagcatcgtagtgcaggagcgcagcctgagcctggccgagaaggtggcggctatcaactactcggtgctgagcctgggcaagttttacgcgcgcaagatttacaagacgccgtacgtgcccatagacaaggaggtgaagatagacagcttttacatgcgcatggcgctcaaggtgctgacgctgagcgacgacctgggcgtgtaccgcaacgaccgcatccacaaggccgtgagcgcgagccggcggcgcgagctgagcgaccgcgagctgatgctgagtctgcgccgggcgctggtagggggcgccgccggcggtgaggagtcctacttcgacatgggggcggacctgcattggcagccgagccggcgcgccttggaggccgcctacggtccagaggacttggatgaggatgaggaagaggaggaggatgcacccgctgcggggtactgacgcctccgtgatgtgtttttagatgcagcaagccccggaccccgccataagggcggcgctgcaaagccagccgtccggtctagcatcggacgactgggaggccgcgatgcaacgcatcatggccctgacgacccgcaaccccgagtcctttagacaacagccgcaggccaacagactctcggccattctggaggcggtggtcccctctcggaccaaccccacgcacgagaaggtgctggcgatcgtgaacgcgctggcggagaacaaggccatccgtcccgacgaggccgggctggtgtacaacgccctgctggagcgcgtgggccgctacaacagcacaaacgtgcagtccaacctggaccggctggtgacggacgtgcgcgaggccgtggcgcagcgcgagcggttcaagaacgagggcctgggctcgttggtggcgctgaacgccttcctggcgacgcagccggcgaacgtgccgcgcgggcaggacgattacaccaactttatcagcgcgctgcggctgatggtgaccgaggtgccccagagcgaggtgtaccagtcgggcccagactactttttccagacgagccggcagggcttgcagacggtgaacctaagccaggctttcaagaatctgcgcgggctgtggggcgtgcaggcgcccgtgggcgaccggtcgacggtgagcagcttgctaacgcccaactcgcggctgctgctgctgctgatcgcgcccttcaccgacagcggcagcgtgaaccgcaactcgtacctgggccacctgctgacgctttaccgcgaggccataggccaggcgcaggtggacgagcagaccttccaggagatcactagcgtgagccgcgcgctgggtcagaacgacaccgacagtctgagagccaccctgaacttcttgctgacaaatagacagcagaagattccggcgcagtacgcgctgtcggccgaggaggagcgcatcctgagatatgtgcagcagagcgtagggcttttcctgatgcaggagggggccacccccagcgccgcgctggacatgaccgcgcgcaacatggaacctagcatgtacgccgccaaccggccgttcatcaataagctgatggactacctgcaccgcgcggctgccatgaactcggactactttactaatgctatactaaacccgcactggctcccgccgccggggttctacacgggcgagtacgacatgcccgaccccaacgatgggttcctgtgggacgacgtggacagcgcggtgttctccccgaccttgcaaaagcgccaggaggcggtacgcacgcccgcgagcgagggcgcggtgggtcggagcccctttcctagcttagggagtttgcatagcttgccgggctcggtgaacagcggcagggtgagccggccgcgcttgctgggcgaggacgagtacctgaacgactcgctgctgcagccgccgcgggtcaagaacgccatggccaataacgggatagagagtctggtggacaaactgaaccgctggaagacctacgctcaggaccatagggatgcgcccgcgccgcggcgacagcgccacgaccggcagcggggcctggtgtgggacgacgaggactcggccgacgatagcagcgtgttggacttgggcgggagcggtggggccaacccgttcgcgcatctgcagcccagactggggcgacggatgttttgaatgaaataaaactcaccaaggccatagcgtgcgttctcttccttgttagagatgaggcgcgcggtggtgtcttcctctcctcctccctcgtacgagagcgtgatggcgcaggcaaccctggaggttccgtttgtgcctccgcggtatatggctcctacggagggcagaaacagcattcgttactcggaactggctccgcagtacgacaccactcgcgtgtacttggtggacaacaagtcggcggacatcgcttccctgaactaccaaaacgaccacagcaacttcctgaccacggtggtgcagaacaacgatttcacccccgccgaggccagcacgcagacgataaattttgacgagcggtcgcggtggggcggtgatttgaagaccattctgcacaccaacatgcccaatgtgaacgagtacatgttcaccagcaagtttaaggcgcgggtgatggtggctaggaaggtggtagatcagaatgataggagcaaggatgagttaaaatatgagtggtttgagtttaccctgcccgagggcaacttttccgagaccatgaccatagacctgatgaacaacgccatcttggaaaactacttgcaagtggggcggcaaaatggcgtgctggagagcgatatcggagtcaagtttgacagcaggaatttcaagctgggctgggacccggtaaccaagctggtgatgcctggggtctacacctacgaggccttccacccggacgttgtgctgctgccgggctgcggggtggacttcaccgagagccgcctgagcaacctcctgggcattcgcaagaagcaacctttccaagagggcttcaggatcatgtatgaggatctcgagggtggtaacatccccgccctcctggatgtcaagcaatatttggatagtaaaaagaagcttgaggaggcaacacagaatgcaaccagggctgctggagatatcagaggagacagtcatattccaagagctgtggaacaagcggctgaaaaggatctggtcattgtaccagtaacacaagatgaaagtaagagaagctataatgtcatagatggcacccatgacaccctctaccgaagttggtacctgtcctatacctacggggaccccgagaagggggtgcagtcgtggacgctgctcaccaccccggacgtcacctgcggcgcggagcaagtctactggtcgctgccggacctcatgcaagaccccgtcaccttccgctctacccagcaagtcagcaactaccccgtggttggcgccgagctcatgcccttccgcgccaagagcttttacaacgacctcgccgtctactcccagctcatccgcagctacacctccctcacccacgtcttcaaccgcttccccgacaaccagatcctctgccgtccgcccgcgcccaccatcaccacggtcagtgaaaacgtgcctgctctcacagatcacgggacgctaccgctgcgcagcagtatccgcggagtccagcgagtgaccgtcactgacgcccgtcgccgcacctgtccctacgtctacaaggccctgggcatagtcgcgccgcgcgtgctttccagtcgcaccttctaaaaaatgtctattctcatctcgcccagcaataacaccggctggggtcttactaggcccagcaccatgtacggaggagccaagaagcgctcccagcagcaccccgtccgcgtccgcggccacttccgcgctccctggggcgcttacaagcgcgggcggacttctaccgccgccgtgcgcaccaccgtcgacgacgtcatcgactcggtggtcgccgacgcgcgcaactatacccccgccccctccaccgtggacgcggtcatcgacagcgtggtggccgacgcgcgcgactatgccagacgcaagagccggcggcgacggatcgccaggcgccaccggagtacgcccgccatgcgcgccgcccgggctctgctgcgccgcgccagacgcacgggccgccgggccatgatgcgagccgcgcgccgcgccgccactgcaccccccgcaggcaggactcgcagacgagcggccgccgccgctgccgcggccatttctagcatgaccagacccaggcgcggaaacgtgtactgggtgcgcgactccgtcacgggcgtgcgcgtgcccgtgcgcacccgtcctcctcgtccctgatctaatgcttgtgtcctcccccgcaagcgacgatgtcaaagcgcaaaatcaaggaggagatgctccaggtcgtcgccccggagatttacggaccaccccaggcggaccagaaaccccgcaaaatcaagcgggttaaaaaaaaggatgaggtggacgagggggcagtagagtttgtgcgcgagttcgctccgcggcggcgcgtaaattggaaggggcgcagggtgcagcgcgtgttgcggcccggcacggcggtggtgtttacgcccggcgagcggtcctcggtcaggagcaagcgtagctatgacgaggtgtacggcgacgacgacatcctggaccaggcggcggagcgggcgggcgagttcgcctacgggaagcggtcgcgcgaagaggagctgatctcgttgccgctggacgagagcaaccccacgcctagcctgaagcccgtgaccctgcagcaggtgctgccccaagcagtgctgctgccgagccgcggggtcaagcgcgagggcgagaatatgtacccgaccatgcagatcatggtgcccaagcgccggcgcgtggaagaagtgctggacaccgtgaaaatggatgtggagcccgaggtcaaggtgcgccccatcaagcaggtggcgccgggcctgggcgtgcagaccgtggacattcagatccccaccgacatggatgttgacaaaaaaccctcgaccagcatcgaggtgcagaccgacccctggctcccagcctccaccgctgccgtctccacttctaccgccgccacggctaccgagcctcccagaaggcgaagatggggccctgccaaccggctgatgcccaactacgtattgcatccttccattatcccgacgccgggctatcgcggcacccggtactacgccagccgcaggcgcccagccagcaaacgccgccgccgcaccgccacccgccgccgtctggcccccgcccgcgtgcgccgcgtaaccacgcgccggggccgctcgctcgttctgcccaccgtgcgctaccaccccagcatcctttaatccgtgtgctgtgatactgttgcagagagatggctctcacttgccgcctgcgcatccccgtcccgaattaccgaggaagatcccgccgcaggagaggcatggcaggcagcggcctcaaccgccgccggcggcgggccatgcgcaggcgcctgagtggcggctttctgcccgcgctcatccccataatcgcggcggccatcggcacgatcccgggcatagcttccgttgcgctgcaggcgtcgcagcgccgttgatgtgcgaataaagcctctttagactctgacacacctggtcctgtatatttttagaatggaagacatcaattttgcgtccctggctccgcggcacggcacgcggccgttcatgggcacctggaacgagatcggcaccagccagctgaacgggggcgccttcaattggagcagtgtctggagcgggcttaaaaatttcggctcgacgctccggacctatgggaacaaggcctggaatagtagcacggggcagttgttaagggaaaagctcaaagaccagaacttccagcagaaggtggtggacggcctagcctcgggcattaacggggtggtggacatagcaaaccaggccgtgcagcgcgagataaacagccgcctggacccgcggccgcccacggtggtggagatggaagatgcaactcctccgccgcccaagggcgagaagcggccgcggcccgacgcggaggagacgatcctgcaggtggacgagccgccctcgtacgaggaggccgtcaaggccggcatgcccaccacgcgtatcatcgcgccactggccactggtgtaatgaaacccgccacccttgacctgcctccgccacccacgcccgctccaccgaaggcagctccggttgtgcagccccctcctgtggcgaccgccgtgcgccgcgtccccgcccgccgccaggcccagaactggcagagcacgctgcacagtatcgtgggcctgggagtgaaaagtctgaagcgccgccgatgctattgagagagaggaaagaggacactaaagggagagcttaacttgtatgtgccttaccgccagagaacgcgcgaagatggctaccccctcgatgatgccgcagtgggcgtacatgcacatcgccgggcaggacgcctcggagtacctgagcccgggtctggtgcagtttgcccgcgccaccgacacgtacttcagcctgggcaacaagtttaggaaccccacggtggctcccacccacgatgtgaccacggaccggtcccagcgtctgacgctgcgctttgtgcccgtggatcgcgaggacaccacgtactcgtacaaggcgcgcttcactctggccgtgggcgacaaccgggtgctagacatggccagcacttactttgacatccgcggcgtcctggaccgcggtcccagcttcaaaccctactcgggcacggcttacaacagcctggcccccaaaggcgcccccaactctagtcagtgggaacaagctaaagctaccaatgccggtcaaaaggaaactcacacatttggagtagccgctatgggcggagaagacattacagtgaaaggtcttcaaattggaactgatgaaactaaggaagatggagaggatgaaatttttgcagatcaaacattccagccagaacctcaagtgggagaacagaactggcaagaaacgtttgttttctatggaggcagagctcttaagaaagaaaccaaaatgaagccatgttatggctcttatgcgagacccacaaatgaaaagggaggacaggctaaatttacacttgatgaaaaaggtcagccaaccaaaattcctgatattacaatggatttctttgatagtccacaagatgatacatcaggtgtaactaataagccagatattgtcatgtatgcagaaaatgtaaatttagaagctcctgacacacatgtagtttacaaaccaggcaaagatgattctagttcttccgctaacctcacacaacaggccatgcctaacagaccgaactacatcgggttcagagacaactttgtgggtcttatgtactacaatagtactggcaacatgggtgtgctggctggtcaggcctctcagttgaatgctgtggtcgacttgcaagacagaaacaccgagctgtcttaccagctattgctagattctctgggtgacagaaccagatactttagcatgtggaattctgcagtggacagctatgaccccgatgtcaggatcattgagaatcacggtgtggaagatgaacttccaaactattgcttcccactgaatggcagtggttctaacagcacatacaaaggtgttaaagctggaactggaaacaattgggatgacgatgaaaatgttgcaagacaaaatcagattggcactggcaacctgttcgccatggagatcaacctccaggccaacctatggaagagttttctgtactcgaacgtggccctgtacctgcccgactcctacaagtacacgccggccaacgtcacgctgcccaccaacaccaacacctacgactacatgaacggccgcgtggtagccccctcgctggtggacgcctacatcaacattggcgcccgctggtcgctggaccccatggacaatgtcaatcccttcaaccaccaccgcaacgcgggcctgcgctaccgctccatgctcctgggcaacggccgctacgtgcccttccacatccaagtgccccaaaagttctttgccatcaagaacctgcttctgctccccggttcctacacctacgagtggaacttccgcaaggacgtcaacatgatcctgcagagttccctcggcaacgacctgcgcgtcgacggcgcctccgtccgcttcgacagcgtcaacctctacgccaccttcttccccatggcgcacaacaccgcctccaccctggaagccatgctgcgcaacgacaccaacgaccagtccttcaacgactacctctcggccgccaacatgctctaccccatcccggccaaggccaccaacgtgcccatctccatcccctcgcgcaactgggccgccttccgcggctggagtttcacccggctcaagaccaaggaaactccctccctcggctcgggtttcgacccctactttgtctactcgggctccatcccctacctcgacgggaccttctacctcaaccacaccttcaagaaggtctccatcatgttcgactcctcggtcagctggcccggcaacgaccggctgctcacgccgaacgagttcgagatcaagcgcagcgttgacggggagggctacaacgtggcccaatgcaacatgaccaaggactggttcctcgtccagatgctctcccactacaacatcggctaccagggcttccacgtgcccgagggctacaaggaccgcatgtactccttcttccgcaacttccagcccatgagcaggcaggtggtcgatgagatcaactacaaggactacaaggccgtcaccctacccttccagcacaacaactcgggcttcaccggctaccttgcgcccaccatgcgccaggggcagccctaccccgccaacttcccctacccgctcatcggctccaccgcagttccctccgtcacccagaaaaagttcctctgcgacagggtcatgtggcgcatcccattctccagcaactttatgtccatgggcgccctcaccgacctgggtcagaacatgctctatgccaactcggcccacgcgctcgacatgacctttgaggtggaccccatggatgagcccaccctcctctatcttctcttcgaagttttcgacgtggtcagagtgcaccagccgcaccgcggcgtcatcgaggccgtctacctgcgcacgcccttctccgccggcaacgctaccacttaagcatgagcggctccagcgaacaagagctcgcggccatcgtgcgcgacctgggatgcgggccctactttttgggaacccacgacaagcgcttccctggcttccttgccggcgacaagctggcctgcgccatcgtcaacacggccggccgcgagaccggaggcgtgcactggctcgcctttggctggaatccgcgctcgcgcacctgctacatgttcgacccctttgggttctcggaccgccggctcaagcagatttacagcttcgagtacgaggccatgctgcgccgaagcgcgcttgcctcctcgcccgaccgctgtctcagcctcgagcagtccacccagaccgtgcaggggcccgactccgccgcctgcggacttttttgttgcatgtttttgcatgccttcgtgcactggcccgaccgacccatggacggaaaccccaccatgaacttgctgacgggggtgccaaacggcatgctacaatcgccacaggtgctgcccaccctcaggcgcaaccaggaggagctctaccgcttcctcgcgcgccactccccttactttcgatcccaccgcgccgccatcgaaaacgccaccgcttttgataaaatgaaacaactgcgtgtatctcaataaacagcactttattttacatgcactggagtatatgcaagttatttaaaagtcgaaggggttctcgcgctcgtcgttgtgcgccgcgctggggagggccacgttgcggtactggtacttgggaagccacttgaactcggggatcaccagtttgggcactggggtctcggggaaggtctcgctccacatgcgccggctcatctgcagggcgcccagcatgtccgggccggagatcttgaaatcacaattggggccggtgctctgcgcgcgcgagttgcggtacacggggttgcagcactggaacaccattagactggggtacttcacactggcaagcacgctcttgtcgctgatctgatccttgtccaggtcctcggcgttgctcaggccgaacggggtcatcttgcacagctggcggcccaggaagggcacgctctgaggcttgtggttacactcgcagtgcacgggcatcagcatcatccccgcgccgcgctgcatattcgggtagagggccttgacgaaggccgtgatctgcttgaaagcttgctgggccttagccccctcgctgaaaaacaggccgcagctcttcccgctaaactggttattcccgcacccggcatcatgcacgcagcagcgcgcgtcatggctggtcagttgcaccacgctacgtccccagcggttctgggtcaccttggccttgctgggctgctccttcaacgcgcgctgcccgttctcgctggtcacatccatctccaccacgtggtccttgtggatcatcaccgtcccatgcagacacttgagctgaccctcgacatcgcagcagccatgatcccacagggcgcagccggtgcactcccagttcttatgcgcgatcccgctgtggctgaagatgtaaccttgcaacaggcgacccatgacggtgctaaatgctttctgggtggtgaaggtcagttgcagaccgcgggcctcctcgttcatccaggtctggcacatcttttggaagatctcggtctgctcgggcatgagcttgtaagcatcgcgcaggccgctgtcgacgcggtagcgttccatcagcacgttcatggtatccatgcccttctcccaggacgagaccagaggcagactcagggggttgcgcacgttcaggacaccgggggtcgcaggctcgacgatgcgttttccgtccttgccttccttcaacagaaccggaggctggctgaatcccactcccacgattacggcatcttcctggggcatctcttcgtcggggtctaccttggtcacatgcttggtctttctggcttgcttcttttttggagggctgtccacggggaccacgtcctcctcggaagacccggagcccacccgctgatactttcggcgcttggtgggcagaggaggtggtggcggcgaggggctcctctcctgctccggcggatagcgcgccgacccgtggccccggggcggagtggcctctcgctccatgaaccggcgcacgtcctgactgccgccggccattgtttcctaggggaagatggaggagcagccgcgtaagcaggagcaggaggaggacttaaccacccacgagcaacccaaaatcgagcaggacctgggcttcgaagagccggctcgtctagaacccccacaggatgaacaggagcacgagcaagacgcaggccaggaggagaccgacgctgggctccagcatggctacctgggaggagaggaggatgtgctgctaaaacacttgcagcgccaatccatcatcctccgggacgccctggccgaccggagcgaaacccctctcagcgtcgaggagctgtgtcgggcctacgagctcaacctcttctcgccgcgcgtgccccccaaacgccagcccaacggcacctgcgagcccaacccgcgtctcaacttctatcccgtctttgcggtccccgaggccctagccacctatcacatctttttcaagaaccaaaagatccccgtctcctgccgcgccaaccgcacccgcgccgacgcgctcctcgctctggggcccggcgcgcgcatacctgatatcgcttccctggaagaggtgcccaagatcttcgaagggctcggtcgggacgagacgcgcgcggcaaacgctctgaaagaaacagcagaggaagagggtcacactagcgccctggtagagttggaaggcgacaacgccaggctggccgtgctcaagcgcagcgtcgagctcacccacttcgcctaccccgccgtcaacctcccgcccaaggtcatgcgtcgcatcatggatcagctcatcatgccccacatcgaggccctcgatgaaagtcaggagcagcgccccgaggacgcccggcccgtggtcagcgacgagcagctcgcgcgttggctcgggacccgcgacccccaggctttggaacagcggcgcaagctcatgctggccgtggtcctggtcaccctcgagctcgaatgcatgcgccgcttcttcagcgaccccgagaccctgcgtaaggtcgaggagaccctgcactacactttcaggcacggtttcgtcaggcaggcctgcaagatctccaacgtggagctgaccaacctggtctcatgcctggggatcctgcacgagaaccgcctgggacagaccgtgctccactctactctgaagggcgaggcgcgtcgggactatgtccgcgactgtgtatttctctttatctgccacacctggcaagcagccatgggcgtgtggcagcagtgtctcgaggacgaaaatctgaaggagctggacaagcttcttgctagaaaccttaaaaagctgtggacgggcttcgacgagcgcaccgtcgcctcggacctggccgagatcgtttttccagaacgcctgaggcagacgctgaaaggcgggctgcccgacttcatgagccagagcatgttgcaaaactaccgcactttcattctcgagcgatctgggatgctacccgccacctgcaacgcattcccctccgactttgtcccgctgagctaccgcgagtgtcccccgccgctgtggagccactgctatctcttgcagctggccaactacatcgcctaccactcggacgtgatcgaggacgtgagcggcgaggggcttctcgagtgccactgccgctgcaacctgtgctccccgcaccgctccctggtctgcaacccccagcttctgagcgagacccaggtcatcggtaccttcgagctgcaaggtccgcaggagtccaccgctccgctgaaactcacgccggggttgtggacttccgcgtacctgcgcaaatttgtacccgaggactaccacgcccatgaaataaagttcttcgaggaccaatcgcgcccacagcacgcggatctcacggcctgcgtcatcacccagggcgcgatcctcgcccaattgcacgccatccaaaaatcccgccaagagtttcttctaaaaaagggtagaggggtctacctggacccccagacgggcgaggtgctcaacccgggtctcccccagcatgccgaggaagaagcaggagccgctagtggagcagatggaagaagaatgggacagccaggcagaggaggacgaatgggaggaggagacagaggaggaagaattggaagaggtggaagaggagcaggaaacagagcagcccgtcgccgcaccatccgcgccggcagccccgccggtcacggatacaacctccacagctccggccaagcctcctcgtagatgggatcgagtgaagggtgacggtaagcacgagcggcagggctaccgatcatggagggtccacaaagccgcgatcatcgcctgcttgcaagactgcggggggaacatcgctttcgcccgccgctacctgctcttccaccgcggggtgaacatcccccgcaacgtgttgcattactaccgtcaccttcacagctaagaaaaagcaagtaagaggagtcgccggaggaggcctgaggatcgcggcgaacgagccctcgaccaccagggagctgaggaaccggatcttccccactctttatgccatttttcagcagagtcgaggtcagcagcaagaactgaaagtaaaaaaccggtctctgcgctcgctcacccgcagttgcttgtaccacaaaaacgaagatcagctgcagcgcactctcgaagacgccgaggctctgttccacaagtactgcgcgctcactcttaaagactaaggcgcgcccacccggaaaaaaggcgggaattacctcatcgccaccatgagcaaggagattcccaccccttacatgtggagctatcagccccagatgggcctggccgcgggcgcctcccaggactactccacccgcatgaactggctcagtgccggcccctcgatgatctcacgggtcaacggggtccgtaaccatcgaaaccagatattgttggagcaggcggcggtcacctccacgcccagggcaaagctcaacccgcgtaattggccctccaccctggtgtatcaggaaatccccgggccgactaccgtactacttccgcgtgacgcactggccgaagtccgcatgactaactcaggtgtccagctggccggcggcgcttcccggtgcccgctccgcccacaatcgggtataaaaaccctggtgatccgaggcagaggcacacagctcaacgacgagttggtgagctcttcgatcggtctgcgaccggacggagtgttccaactagccggagccgggagatcgtccttcactcccaaccaggcctacctgaccttgcagagcagctcttcggagcctcgctccggaggcatcggaaccctccagttcgtggaggagtttgtgccctcggtctacttcaaccccttctcgggatcgccaggcctctacccggacgagtttataccgaacttcgacgcagtgagagaagcggtggacggctacgactgaatgtcccatggtgactcggctgagctcgctcggttgaggcatctggaccactgccgccgcctgcgctgcttcgcccgggagagctgcggactcatctactttgagtttcccgaggagcaccccaacggccctgcacacggagtgcggatcaccgtagagggcaccaccgagtctcacctggtcaggttcttcacccagcaacccttcctggtcgagcgggaccggggagctaccacctacaccgtctactgcatctgtcctaccccgaagttgcatgagaatttttgctgtactctttgtggtgagtttaataaaagctgaactaagaaccttctttggaatcccttgtcatcatcaaatcaacaagaccatcaacttcacctttgaggaacaggtgaactttacctgcaagccacacaagaagtacatcatctggttttatcacaacactactctagcagtagccaacacctgctcgaacgacggtgttctcctacctaacaatctcaccagtggactaaccttctcagttaaaagggcaaagctaattcttcatcgccctattgtagaaggaacttaccagtgtcagagcggaccttgcttccacagtttcactttggtgaacgttaccggcagcagcacagccgctccagaaacatctaaccttctttctgatactaacaaacctcgtgtcggaggtgagctttgggttccatctctaacagagggtgggagttctattgaagtggttgggtatttgattttaggggtggtcattggtgggtgcatagcagtgctgtatcaacttccttgctgggtcgaaatcagggtatttatctgctgggtcagacattgtggggaggaaccatgaaggggctcttgctgattatcctttccctggtggggggtgtgctgtcatgccacgaacagccacgatgtaacattaccacaggcaatgagaggaacgactgctctgtagttatcaaatgcgagcaccattgtcctctcaacatcacattcaagaataagaccatgggaaatgtatgggtgggattctggcaaccaggagatgagcagaactacacggtcactgtccatggtagcgatggcaatcacactttcggtttcaaattcatttttgaagtcatgtgtgatatcacactacatgtggctagacttcatggcttgtggccccctaccaaggagaacatggtgggtttttctttggcttttgtgatcatggcctgcttgatgtcaggtctgctggtaggggctctagtgtggtttctgaaacgcaagcccaggtacggaaatgaggagaaggaaaaattgctataaattctttttctcttcgcacaaccatgaatacagtgttccgtatcgtgctgctctctcttcttgtagctttcggtcaggcaggaattcatattattaatgctacatggtgggataatataactttagtgggaccctcagatactccagttacctggtatgatggcaagggattgcaattttgtgacggaagtacagttaagaatccgcagatcagacatacttgtaatgatcaaaacttaactctgattcatgttaacaaaacccatgaaagaacatacatgggttacagacatgacagtaagggaaaagtagactataaggttacagtcattccacctcctcctgctactgtaaagccacaaccagatccagaaaatgtctttgtttatatgggaaataatgtaactttagttggacctccaggaattccagttagttggtattatcataatggcacacagttctgcgatggagataaaattattcatccagaattcaaccacacctgtgataaacaaaaccttacactgctgtttgtaaactttacacatgatggaggctatcttggattcaattacaaaggtactcagagaattcagtatgaggttatagttttagatcgatttccaaattctggtcagatgaaaattgaagaacaaagtgaggaaacagaacagaaacatactgagcataataaggctggacaaaagcagggtatagatacaaatcaaaagaaagctaataacagacaaaagccatctcaaaggccatcaagaagacggccgacaaacactcctgagacaaaacaacttacagtgtctattgggtctaacttaactttagttggtccagatggaaaagtcacttggtatgatggtgatttaaaaagaccatgtgaagaacaaaactataggcttccacatcagtgtagtgctcagaacttaactttaattaatgtaactaaatctcatgagggaacttactatggcactaatgacaaagacgaaagcaaaagatacagagtgaaagtgaacactacaaattctcaagctgtaaaaattaacccatataccagacctactactcctgatcagaaacacagatttgaattacaaattgaaaataatgcaaatgatgaagaatcaaaaattccatctactactgtggcaatcgtggtgggagtgattgcgggcttcataactataatcattgtcattctgtgctacatctgctgccgcaagcgtcccagggcatacaatcatatggtagacccactactcagcttctcttactgagactcagtcactttcatttcagaaccatgaaggctttcacagcttgcgttctgtttaacataatcacacttagtgtagctgcaaatggttttaaacatgttaatgttaccagattaagtaatgtaacactgacaggagctggaattaatactacatggacagggtattttaatgagggtccaaaaggaaaaaatgggtggatgaatatttgcacatggggcgatcctagatatgtgtgccatggaaatagcagtactattactaatcttacagttgtggcacttctaaatttaaccactaacagaagatttaaagcagaaagttttactagtaacgatggttatgaaactaccagtgcaaaattttatgaaattaaaattattgagcttccaacaactagagcacccaccacagttaggacaacacagcctaccactgtgcccactacacatccaaccaccacagtcagtacaactattgagaccactactcatactacacagctagacacaacagtgcagaatactactttattgattgggtttttactgagaggaaatgaaagtactactgaacagacagaggctacctcaagtgccttcagcagcactgcaaatttaacttcgcttgcttggactaatgaaaccggagtatcattgatgaatcgacagccttactcaggtttggatattcaaattacttttctggttgtctgtgggatctttattcttgcggttcttctgtactttgtctgctgcaaagccagagagaaatctaggcggcccatatacaggccagtaatcggggaacctcagcctctccaagtggatggaggcttaaggaatcttctcttctcttttacagtatggtgatcagccatgattcctaggttcttcctatttaacatcctgttctgtctcttcaacatctgtgctgccttcgcggccgtctcgcacgcctcgcccgactgtctagggcctttcccaacatacctcctctttgccctgctaacctgcacctgcgtctgcagcattgtctgcgtggtcatcacctttctgcagctcatcgactggtgctgcgcgcgctacaattatctccaccacagtcccgaatacagggacgagaacgtagccagaatcttaaggctcatctgaccatgcagcctctgctcatgctgatatccctcctatcccctgcccttgccacttctgctgattactctaaatgcaaattcgcggacatatggaatttcttagattgctatcaggagaaaattgatatgccctcctattacttggtgattgttggggtagtcatggtctgctcatgcactttctttgccattatgatctacccctgttttaatcttggctggaactctgttgaggcattcacatacacactagaaaacagttcactagcctccacgccaccacccacaccgcctccccgcagaaatcagttccctatgattcagtacttagaagagccccctccccggcccccttccactgttagctactttcacataaccggcggcgatgactgaccacctggacctcgagatggacggccaggcctccgagcagcgcatcctgcaactgcgcgtccgacagcagcaggagcgggccgccaaggagctcctcgatgccatcaacatccaccagtgcaagaagggcatcttctgcctggtcaagcaggcaaagatcacctacgagctcgtgtccggcggcaagcagcatcgcctcgcctatgagctaccccagcagaagcaaaagttcacctgcatggtgggcgtcaaccccatagtcatcacccagcagtcgggcgagaccaacggctgcatccactgctcctgcgaaagccccgagtgcatctactccctcctcaagaccctttgcggactccgcgacctcctccccatgaactgatgttgattaaaagcccaaaaaccaatcaaacccttccccaattactcataagaataaatcattggaactaatcattcaataaagatcacttacttgaaatctgaaagtatgtctctggtgtagttgttcagcagcacctcggaaccctcctcccagctctggtactccagtccccggcgggcggcgaacttcctccacaccttgaaagggatgtcaaattcctggtccacaattttcattgtcttccctcagatgacaaagaggctccgggtggaagatgacttcaaccccgtctacccctatggctacgcgcggaatcagaatatccccttccttactcccccctttgtttcttccgatggattccaaaacttcccacctggggtcctgtcactcaaactggctgacccaatcgccatcactaatggggatgtttcactcaaggtgggagggggtcttactgttgaaaaagatagtggaaatctaaaggtgaaccctaaggctcccttgcaagttacaactgataaacagttggaaattgcactggcttatccatttgaagtcagtaatggcaagcttggcataaaagcaggtcatggattgaaagtcattgacaaaattgctggtttggaaggtttggcaggtacgcttgtagttttgactggaaaaggaataggtactgaaaatcttgaaaacagtgatgggtcaagtagaggagttggtataaacgtaagacttgctaaagatggaggtctgtcttttgataaaaagggtgatttagttgcttggaataaacatgatgacagacgcactctatggacaactcccgacccatccccaaattgtacaatcgatcaggaaagggattcaaagctcactttagtattaacaaaatgtggcagtcaaattttggctaatgtctctttacttgttgtaaaaggaaaatttagtaacataaacaataatactaatccaactgataaaaaaatcacagtaaagctactttttaatgaaaagggagtattaatggacagttcgacacttaagaaagaatattggaactacagaaatgataattctactgtatctcaggcctatgataatgcagttccttttatgccaaacataaaagcttatcctaaacctaccacagacacttcggctaaaccagaagataaaaaaagtgctgctaaaagatacattgtgagcaatgtctatattggaggcttgccagataaaactgttgttataactattaagtttaatgcagaaactgaatgtgcttattcgattacctttgaattcacatgggcaaaaacctttgaagatgtgcagtttgattcctcctcttttaccttttcctatattgcccaagaaaatgaggacgaagacaaataaaatgttttaaaatgaattcatgtatctttattgatttttacaccagcacgggtagtcagtctcccaccaccagcccatttcacagtgtaaacgattctctcagcacgggtggccttaaatagggaaatgttctgattagtgcgggaactggacttggggtctataatccacacagtttcctggcgagccaaacgggggtcggtgattgagatgaagccgtcctctgaaaagtcatccaagcgggcctcacagtccaaggtcacagtctggtgaaacgagaagaacgcacagattcatactcggaaaacaggatgggtctgtgcctctccatcagcgccctcaacagtctctgccgccggggctcggtgcggctgctgcagatgggatcgggatcacaagtctctctgactatgatccccacagccttcagcatcagtctcctggtgcgtcgggcacagcaccgcatcctgatctcgctcatgttctcacagtaagtgcagcacataatcaccatgttattcagcagcccataattcagggtgctccagccaaaactcatgttggggatgatggaacccacgtgaccatcgtaccagatgcggcagtatatcagatgcctgcccctcatgaacacactgcccatatacatgatctctttgggcatgtctctgttcacaatctgacggtaccagggaaagcgctggttgaacatgcacccgtaaatgactctcctgaaccacacggccagcagggtgcctcccgcccgacactgcagggagcccggggatgaacagtggcaatgcaggatccagcgctcgtacccgctcaccatctgagctctcaccaagtccagggtagcggggcacaggcacactgacatacatctttttaaaatttttatttcctctggagtcaagatcatatcccaggggactggaaactcttggagcagggtaaagccagcagcacatggtaatccacggacagaacttacattatgataatctgcatgatcacaatcaggcaacaggggatgttgttcagtcagtgaagccctggtttcctcatcagatcgtggtaaacgggccctgcgatatggatgatggcggagcgagctggattgaatctcggtttgcattgtagtggattctcttgcgtaccttgtcgtacttctgccagcagaaatgggcccttgaacagcagatacccctcctgcggccgtcctttcgctgctgccgctcagtcatccaactgaagtacatccattctcgaagattctggagaagttcctctgcatctgatgaaacaaaaaacccgtccatgcgaattcccctcatcacatcagccaggactctgtaggccatccccatccagttaatgctgccttgtctatcattcagagggggcggtggcaggattggaagaaccatttttattccaaacggtctcgaaggacgataaagtgcaagtcacgcaggtgacagcgttcccctccgctgtgctggtggaaacagacagccaggtcaaaacccactctattttcaaggtgctcgaccgtggcttcgagcagtggctctacgcgtacatccagcataagaatcacattaaaggctggccctccatcgatttcatcaatcatcaggttacattcctgcaccatccccaggtaattctcatttttccagccttggattatctctacaaattgttggtgtaagtccactccgcacatgtggaaaagctcccacagtgccccctccactttcataatcaggcagaccttcataatagaaacagatcctgctgctccaccacctgcagcgtgttcaaaacaacaagattcaataaggttctgccctccgccctgagctcgcgcctcaatgtcagctgcaaaaaatcacttaagtcctgggccactacagctgacaattcagagccagggctaagcgtgggactggcaagcgtaagggaaaactttaatgctccaaagctagcacccaaaaactgcatgctggaataagctctctttgtgtctccggtgatgccttccaaaatgtgagtgataaagcgtggtagtttttctttaatcatttgcgtaatagaaaagtcctgtaaataagtcactaggaccccagggaccacaatgtggtagcttacaccgcgtcgctgaagcatggttagtagagatgagagtctgaaaaacagaaagcatgcactaaactaaggtggctattttcactgaaggaaaaatcactctctccaacaacagggtacccactgggtggcccttgcggacatacaaaaatcggtccgtgtgattaaaaagcagcacagtaagttcctgtcttcttccggcaaaaatcacatcggactgggttagtatgtccctggcatggtagtcattcaaggccataaatctgccctgatatccagtaggaaccagcacactcacttttaggtgaagcaataccaccccatgcggaggaatgtggaaagattcagggcaaaaaaaattatatctattgctagtcccttcctggacgggagcaatccctccaggactatctatgaaagcatacagagattcagccatagctcagcccgcttaccagtagacagagagcacagcagtacaagcgccaacagcagcgactgactacccactgacccagctccctatttaaaggcgccttacactgacgtaatgaccaaaggtctaaaaaccccgccaaaaaaaaacacacacgccctgggtgttttttgcgaaaacacttccgcgttctcacttcctcgtattgatttcgtgacttaacttccgggttcccacgttacgtcacttctgcccttacatgtaactcagtcgtagggcgccatcttgcccacgtccaaaatggcttccatgtccagccacgcctccgcggcgaccgttagccgtgcgtcgtgacgtcatttgcatcatcttctctcgtccaatcagcgctggccccgccctaaattcaaaagctcatttgcatgttaacttttgtttactttgtggggtatattattgatgatgtttttctcagactctgggagcggagctcagagaaatctctactcgctggcactcaagagtggcctcttgacgggctcgactggtttaaataccctgtggatcagctgatctgtgacataaacaccggactttgacacggacgcggaaattcgcgaaaaaacaccgcaatcgaaacccccacgtaatcggtcaaagtctctcggccctcggtaaatattccgccctgggcgggaccggtatttttcacttttcacttcctcattcagttttcgcgccaaaatgacctaattttacttgcatccgcccagaattacctcatatccgggcgtggccgcgggaaaatcggccgtttccgggtctaaagtccgcttttttatacgtcatcagccccgcgacttgcttccgggctaggccacgcctccgcggcgaccgttagccgtgcgtcgtgacgtcatttgcatcaacgtttctcggccaatcagcagtagccccgccctaaatttaaaacctcatttgcatattaacttttgtttactttgtggggtatattattgatgatg

SEQ ID NO: 25 - DNA, 35250 bp, Adenovirus D25
  MISC_FEATURE (1)..(35250): Complete Genome
catcatcaataatataccccacaaagtaaacaaaagttaatatgcaaatgaggttttaaatttagggcggggctactgctgattggccgagaaacgttgatgcaaatgacgtcacgacgcacggctaacggtcgccgcggaggcgtggcctaggccggaagcaagtcgcggggctgatgacgtataaaaaagcggactttagacccggaaacggccgattttcccgcggccacgcccggatatgaggtaattctgggcggatgcaagtgaaattaggtcattttggcgcgaaaactgaatgaggaagtgaaaagcgaaaaataccggtcccgcccagggcggaatatttaccgagggccgagagactttgaccgattacgtgggggtttcgattgcggtgtttttttcgcgaatttccgcgtccgtgtcaaagtccggtgtttatgtcacagatcagctgatccacagggtatttaaaccagtcgagcccgtcaagaggccactcttgagtgccagcgagtagagatttctctgagctccgctcccagagtgtgagaaaaatgagacacctgcgtctcctgcctggaactgtgcccttggacatggccgcattattgctggatgactttgtgagtacagtattggaggatgaactgcaaccaactccgttcgagctggggcccacacttcaggacctctatgatctggaggtagatgcccaggaggacgacccgaacgaagaggctgtgaatttaatatttccagaatctctgattcttcaggctgacatagccagcgaagctgtacctacaccacttcatacaccgactctgtcacccatacctgaattggaagaggaggacgaactagacctccggtgttatgaggaaggttttcctcccagcgattcagaggacgaacggggtgagcagagtatggctataatctcagactatgcttgtgtggttgtggaagagcattttgtgttggacaatcctgaggtgcctgggcaaggctgtagatcctgccaatatcaccgggatcagaccggagaccaaaatgcttcctgtgctctgtgttacatgaaaatgagcttcagctttatttacagtaagtggagtgaatgtgagagaggctgagtgcttaacacatcactgtgtgatgcttgaacagctgtgctaagtgtggtttattttgttactaggtccggtgtcagaggatgagtcatcaccctcagaagaagaccacccgtctccccctgatctcacagatgacacgcccctgcaagtgatcagacccaccccagtcagactcagtggggagaggcgaatggctgttgacaaaatcgaggacttgttgcaggacatgggtggggatgaacctttagacctgagcttgaaacgccccaggaactaggcgcagctgtgctgagtcatgtgtaaataaagttgtacaataaaagtatatgtgacgcatgcaaggtgtggtttatgactcatgggcggggcttagtcctatataagtggcaacacctgggcactcgggcacagaccttcagggagttcctgatggatgtgtggactatccttgcagactttagcaagacacgccggcttgtagaggatagttcagacgggtgctccgggttctggagacactggtttggaactcctctatctcgcctggtgtacacagttaagaaggattataaagaggaatttgaaaatatttttgctgactgctctggcctgctagattctctgaatcttggccaccagtcccttttccaggaaagggtactccacagccttgatttttccagtccagggcgcactacagccggggttgcttttgtggtttttctggttgacaaatggagccaggacacccaactgagcaggggatacatcctggacttcgcagccatgcacctgtggagggcctggatcaggcagcggggacagagaatcttgaactactggcttctacagccagcagctccgggtcttcttcgtctacacagacaaacatccatgttggaggaagaaatgaggcaggccatggacgagaacccgaggagcggcctggaccctccgtcggaagaggagctggattgaatcaggtatccagcctgtacccagagcttagcaaggtgctgacatccatggccaggggagtgaagagggagaggagcgatgggggcaataccgggatgatgaccgagctgactgccagcctgatgaatcgcaagcgcccagagcgcattacctggcatgagctacagatggagtgcagggatgagataggcctgatgcaggataaatatggtctggagcagataaaaacccactggttaaacccagatgaggattgggaggaggccattaagaaatatgccaagatagccctgcgcccagattgcaagtacagggtgaccaagacggtgaatatcagacatgcctgctacatctcggggaacggggcagaggtggtcatcgataccctggacaaggccgccttcaggtgttgcatgatgggaatgagagccggagtgatgaatatgaattccatgatcttcatgaacatgaagttcaatggagagaagtttaatggagtgatgttcatggccaacagccacatgaccctgcatggctgtagtttcttcggcttcaacaatatgtgcgcagaggtctggggcgcttccaagatcaggggatgtaagttttatggctgctggatgggcgtggtcggaagacccaagagcgagatgtctgtgaagcagtgtgtgtttgagaaatgctacctgggagtttctaccgagggcaatgctagagtgagacattgctcttccctggagacgggctgcttctgcctggtgaagggtacagcctctctgaagcataatatggtgaagggatgcacggatgagcgcatgtacaacatgctgacctgcgactcgggagtctgtcatatcctgaaaaacatccatgtgacctcccaccccagaaagaagtggccagtgtttgagaataacctgctgatcaagtgccatatgcacctgggcgccagaaggggcaccttccagccgtaccagtgcaactttagtcagaccaagctgctgttggagaacgatgccttctccagggtgaacctgaacggcatctttgacatggatgtctcggtgtacaagatcctgagatacgatgagaccaagtccagggtgcgcgcttgcgagtgcgggggcagacacaccagaatgcaaccagtggccctggatgtgaccgaggagctgagaccagaccacctggtgatggcctgtaccgggaccgagttcagctccagtggggaggatacagattagaggtaggtttgagtagtgggcgtggctaaggtgactataaaggcgggtgtcttacgagggtctttttgcttttctgcagacatcatgaacgggactggcggggccttcgaaggggggctttttagcccttatttgacaacccgcctgccgggatgggccggagttcgtcagaatgtgatgggatcgacggtggatgggcgcccagtgcttccagcaaattcctcgaccatgacctacgcgaccgtggggaactcgtcgctcgacagcaccgccgcagccgcggcagccgcagccgccatgacagcgacgagactggcctcgagctacatgcccagcagcggtagtagcccctctgtgcccagttccatcatcgccgaggagaaactgctggccctgctggccgagctggaagccctgagccgccagctggccgccctgacccagcaggtgtccgagctccgcgaacagcagcagcagcaaaataaatgattcaataaacacagattctgattcaaacagcaaagcatctttattatttattttttcgcgcgcggtaggccctggtccacctctcccgatcattgagagtgcggtggattttttccaggacccggtagaggtgggattggatgttgaggtacatgggcatgagcccgtcccgggggtggaggtagcaccactgcatggcctcgtgctctggggtcgtgttgtagatgatccagtcatagcaggggcgctgggcgtggtgctggatgatgtccttgaggaggagactgatggccacggggagccccttggtgtaggtgttggcaaaacggttgagctgggagggatgcatgcggggggagatgatgtgcagtttggcctggatcttgaggttggcgatgttgccacccagatcccgccgggggttcatgttgtgcaggaccaccagaacggtgtagcccgtgcacttggggaacttgtcatgcaacttggaagggaatgcgtggaagaatttggagacgcccttgtgcccgcccaggttttccatgcactcatccatgatgatggcaatgggcccgtgggctgcggctttggcaaagacgtttctggggtcagagacatcgtaattatgctcctgggtgagatcatcataagacattttaatgaatttggggcggagggtgccagattgggggacgatggttccctcgggccccggggcgaagttcccctcgcagatctgcatctcccaggctttcatctcggagggggggatcatgtccacctgcggggcgatgaaaaaaacggtttccggggcgggggtgatgagctgcgaggagagcaggtttctcaacagctgggacttgccgcacccggtcgggccgtagatgaccccgatgacgggttgcaggtggtagttcaaggacatgcagctgccgtcgtcccggaggaggggggccacctcgttgagcatgtctctgacttggaggttttcccggacgagctcgccgaggaggcggtccccgcccagcgagagaagctcttgcagggaagcaaagtttttcaggggcttgagcccgtcggccatgggcatcttggcgagggtctgcgagaggagctccaggcggtcccagagctcggtgacgtgctctacggcatctcgatccagcagacttcctcgtttcgggggttgggacgactgcgactgtagggcacgagacgatgggcgtccagcgcggccagcgtcatgtccttccagggtctcagggtccgcgtgagggtggtctccgtcacggtgaaggggtgggccccgggttgggcgcttgcaagggtgcgcttgagactcatcctgctggtgctgaaacgggcacggtcttcgccctgcgcgtcggcgagatagcagttgaccatgagctcgtagttgagggcctcggcggcgtggcccttggcgcggagcttgcccttggaagagcgcccgcaggcgggacagaggagggattgcagggcgtagagcttgggcgcaagaaagacggactcgggggcgaaggcgtccgctccgcagtgggcgcagacggtctcgcactcgactagccaggtgagctcgggctgctcggggtcaaaaaccagttttcccccgttctttttgatgcgcttcttacctcgcgtctccatgagtctgtgtccgcgctcggtgacaaacaggctgtctgtgtccccgtagacggacttgatgggcctgtcctgcaggggcgtcccgcggtcctcctcgtagagaaactcagaccactctgagacgaaggcgcgcgtccacgccaagacaaaggaggccacgtgcgaggggtagcggtcgttgtccaccagggggtccaccttttccaccgtgtgcagacacatgtccccctcctccgcatccaagaaggtgattggcttgtaggtgtaggccacgtgaccgggggtcccagacgggggggtataaaagggggcgggtctgtgctcgtcctcactctcttccgcgtcgctgtccacgagcgccagctgttggggtaggtattccctctcaagagcgggcatgacctcggcactcaggttgtcagtttctagaaacgaggaggatttgatgttggcctgccctgccgcgatgctttttaggagactttcatccatctggtcagaaaagactatttttttattgtcaagcttggtggcgaaggagccatagagggcgtttgagagaagcttggcgatggatctcatggtctgatttttgtcacggtcggcgcgctccttggccgcgatgttgagctggacatattcgcgcgcgacacacttccattcggggaagacggtggtgcgctcgtcgggcacgatcctgacgcgccagccgcggttatgcagggtgaccaggtccacgctggtggccacctcgccgcgcaggggctcgttggtccagcagagtctgccgcccttgcgcgagcagaacgggggcagcacatcaagcagatgctcgtcaggggggtccgcatcgatggtgaagatgcccggacagagttccttgtcaaaataatcgatttttgaggatgcatcgtccaaggccatctgccactcgcgggcggccagcgctcgctcgtaggggttgaggggcggaccccaaggcatgggatgcgtgagggcggaggcgtacatgccgcagatgtcatagacatagatgggctccgagaggatgccgatgtaggtgggatagcagcgccccccgcggatgctggcgcgcacgtagtcatacaactcgtgcgagggggccaagaaggcggggccgagattggtgcgctgcggctgctcggcgcggaagacgatctggcgaaagatggcatgcgagttggaggagatggtgggtcgttggaagatgttaaagtgggcgtggggcaggcggaccgagtcgcggatgaagtgcgcgtaggagtcttgcagcttggcgacgagctcggcggtgacgaggacgtccatggcgcagtagtccagcgtttcgcggatgatgtcataactcgcctctcctttcttctcccacagctcgcggttgagggcgtattcctcgtcatccttccagtactcccggagcgggaatcctcgatcgtccgcacggtaagagcccagcatgtagaaatggttcacggccttgtagggacagcagcccttctccacggggagggcgtaagcttgagcggccttgcggagcgaggtgtgcgtcagggcaaaggtgtccctgaccatgactttcaagaactggtacttgaaatccgagtcgtcgcagccgccgtgctcccagagctcgaaatcggtgcgcttctttgagagggggttaggcagagcgaaagtgacgtcattgaagagaatcttgcctgcccgcggcatgaaattgcgggtgatgcggaaagggcccgggacggaggctcggttgttgatgacctgggcggcgaggacgatctcgtcgaagccgttgatgttgtgcccgacgatgtagagttccatgaatcgcgggcggcctttgatgtgcggcagctttttgagctcctcgtaggtgaggtcctcggggcattgcaggccgtgctgctcgagcgcccactcctggagatgtgggttggcttgcatgaaggaagcccagagctcgcgggccatgagggtctggagctcgtcgcgaaagaggcggaactgctggcccacggccatcttttctggggtgacgcagtagaaggtgagggggtcccgctcccagcgatcccagcgtaagcgcacggcgagatcgcgagcgagggcgaccagctcggggtccccggagaatttcatgaccagcatgaaggggacgagctgcttgccgaaggaccccatccaggtgtaggtttctacatcgtaggtgacaaagagccgctccgtgcgaggatgagagccgattgggaagaactggatttcctgccaccagttggacgagtggctgttgatgtgatgaaagtagaaatcccgccggcgaaccgagcactcgtgctgatgcttgtaaaagcgtccgcagtactcgcagcgctgcacgggctgtacctcatccacgagatacacagcgcgtcccttgaggaggaacttcaggagtggcggccctggctggtggttttcatgttcgcctgcgtgggactcaccctggggctcctcgaggacggagaggctgacgagcccgcgcgggagccaggtccagatatcggcgcggcgggggcggagagcgaagacgagggcgcgcagttgggagctgtccatggtgtcgcggagatccaggtccgggggcagggttctgaggttgacctcgtagaggcgggtgagggcgtgcttgagatgcagatggtacttgatttctacgggtgagttggtggtcgtgtccacgcattgcatgagcccgtagctgcgcggggccacgaccgtgccgcggtgcgcttttagaagcggtgtcgcggacgcgctcccggcggcagcggcggttccggccccgcgggcaggggcggcagaggcacgtcggcgtggcgctcgggcaggtcccggtgctgcgccctgagagcgctggcgtgcgcgacgacgcggcggttgacatcctggatctgccgcctctgcgtgaagaccactggccccgtgactttgaacctgaaagacagttcaacagaatcaatttcggcgtcattgacggcggcctgacgcaggatctcttgcacgtcgcccgagttgtcctggtaggcgatctcggacatgaactgctcgatctcctcctcctggagatcgccgcggcccgcgcgctcgacggtggcggcgaggtcattcgagatgcgacccatgagctgcgagaaggcgcccaggccgctctcgttccagacgcggctgtagaccacgtccccgtcggcgtcgcgcgcgcgcatgaccacctgcgcgaggttgagctccacgtgccgcgcaaagacggcgtagttgcgcaggcgctggaagaggtagttgagggtggtggcgatgtgctcggtgacgaagaagtacatgatccagcggcgcaggggcatctcgctgatgtcgccgatggcttccagcctttccatggcctcgtagaagtccacggcgaagttgaaaaactgggcgttgcgggccgagaccgtgagctcgtcttccaggagccggatgagttcggcgatggtggcgcgcacctcgcgctcgaaatccccgggggcctcctcctcttcctcttcttccatgacgacctcttcttctatttcttcctctgggggcggtggtggtggcgggggccgacgacgacggcgacgcaccgggagacggtcgacgaagcgctcgatcatctccccgcggcggcgacgcatggtttcggtgacggcgcgaccccgttcgcgaggacgcagcgtgaagacgccgccggtcatctcccggtaatggggcgggtccccattgggcagcgatagggcgctgacgatgcatcttatcaattgcggtgtaggggacgtgagcgcgtcgagatcgaccggatcggagaatctttcgaggaaagcgtctagccaatcgcagtcgcaaggtaagctcaaacacgtagcagccctgcggacgctgttagaattgcggttgctgatgatgtaattgaagtaggcgtttttgaggcggcggatggtggcgaggaggaccaggtccttgggtccagcttgctggatgcggagccgctcggccatgccccaggcctggccctgacaccggctcaggttcttgtagtagtcatgcatgagcctctcaatgtcatcactggctgaggcggagtcttccatgcgggtgaccccgacgcccctgagcggctgtacgagcgccaggtcggcgacgacgcgctcggcgaggatggcctgttgcacgcgggtgagggtgtcctggaagtcgtccatgtcgacgaagcggtgataggccccggtgttgatggtgtaggtgcagttggccatgagcgaccagttgacggtctgcaggccgggctgcacgacctcggagtacctgagccgcgagaaggcgcgcgagtcgaagacgtagtcgttgcaggtgcgcacgaggtactggtatccgactaggaagtgcggcggcggctggcggtagagcggccagcgctgggtggccggcgcgcccggggccaggtcctcgagcatgaggcggtggtagccgtagaggtagcgggacatccaggtgatgccggcggcggtggtggaggcgcgcgggaactcgcggacgcggttccagatgttgcgcagcggcaggaaatagtccatggtcggcacggtctggccggtgagacgcgcgcagtcattgacgctctagaggcaaaaacgaaagcggttgagcgggctcttcctccgtagcctggcggaacgcaaacgggttaggccgcgtgtgtaccccggttcgagtcccctcgaatcaggctggagccgcgactaacgtggtattggcactcccgtctcgacccgagcccgatagccgccaggatacggcggagagccctttttgccggccgagtggggtcgctagacttgaaagcggtcgaaaaccccgccgggtagtggctcgcgcccgtagtctggagaagcatcgccagggttgagtcgcggcagaacccggttcgaggacggccgcggcgagcgggacttggtcaccccgccgatataaagacccacagccagccgacttctccagttacgggagcgagcccccttttttctttttgccagatgcatcccgtcctgcgccaaatgcgtcccacccccccggcgaccaccgcgaccgcggccgtagcaggcgccggcgctagccagccaccacagacagagatggacttggaagagggcgaagggctggcaagactgggggcgccgtccccggagcgacatccccgcgtgcagctgcagaaggacgtgcgcccggcgtacgtgcctacgcagaacctgttcagggaccgcagcggggaggagcccgaggagatgcgcgactgccggtttcgggcgggcagggagctgcgcgagggcctggaccgccagcgcgtgctgcgcgacgaggatttcgagccgaacgagcagacggggatcagccccgcacgcgcgcacgtggcggcagccaacctggtgacggcctacgagcagacggtgaagcaggagcgcaacttccaaaagagtttcaacaaccacgtgcgcacgctgatcgcgcgcgaggaggtggccctgggcctgatgcacctgtgggacctggcggaggccatcgtgcagaacccggacagcaagcctctgacggcgcagctgttcctggtggtgcagcacagcagggacaacgaggcgttcagggaggcgctgctgaacatcgccgagcccgagggtcgctggctgctggagctgatcaacatcttgcagagcatcgtagtgcaggagcgcagcttgagcctggccgagaaggtggcggcgatcaactactcggtgttgagcctgggcaagttttacgcgcgcaagatttacaagacgccgtacgtgcccatagacaaggaggtgaagatagacagcttttacatgcgcatggcgctcaaggtgctgacgctgagcgacgaccttggcgtgtaccgcaacgaccgcatccacaaggccgtgagcacgagccggcggcgcgagctgagcgaccgcgagctgatgctgagtctgcgccgggcgctggtagggggcgccgccggcggcgaggagtcctacttcgacatgggtgcggacctgcattggcagccgagccggcgcgccttggaggccgcctacggttcagaggacttggatgaggaagaggaagaggaggaggatgcacccgctgcggggtactgacgcctccgtgatgtgtttttagatgtcccagcaagccccggaccccgccataagggcggcgctgcaaagccagccgtccggtctagcatcggacgactgggaggccgcgatgcaacgcatcatggccctgacgacccgcaaccccgagtcctttagacaacagccgcaggccaacagactctcggccattctggaggcggtggtcccctctcggaccaaccccacgcacgagaaggtgctggcgatcgtgaacgcgctggcggagaacaaggccatccgtcccgacgaggccgggctggtgtacaacgccctgctggagcgcgtgggccgctacaacagcacgaacgtgcagtccaacctggaccggctggtgacggacgtgcgcgaggccgtggcgcagcgcgagcggttcaagaacgagggcctgggctcgctggtggcgctgaacgccttcctggcgacgcagccggcgaacgtgccgcgcgggcaggacgattacaccaactttatcagcgcgctgcggctgatggtgaccgaggttccccagagcgaggtgtaccagtcgggcccggactactttttccagacgagccggcagggcctgcagacggtgaacctgagccaggctttcaagaacctgcgcgggctgtggggcgtgcaggcgcccgtgggcgaccggtcgacggtgagcagcttgctgacgcccaactcgcgactgctgctgctgctgatcgcgcccttcaccgacagcggcagcgtgaaccgcaactcgtacctgggccacctgctgacgctgtaccgcgaggccataggccaggcgcaggtggacgagcagaccttccaggagatcacgagcgtgagccgcgcgctggggcagaacgacaccgacagtctgagggccaccctgaactttttgctgaccaatagacagcagaagatcccggcgcagtacgcactgtcggccgaggaggaaaggatcctgagatatgtgcagcagagcgtagggctatttctgatgcaggagggtgccacccccagtgccgcgctggacatgaccgcgcgcaacatggaacctagcatgtacgctgccaaccggccgttcatcaataagctgatggactacctgcaccgcgcggcggccatgaacacggactactttaccaacgccatattgaacccgcactggctcccgccgccggggttctacacgggcgagtacgacatgcccgaccccaacgacgggttcctgtgggacgacgtggacagcgcggtgttctcgccggcctttcaaaagcgccaggaggcgccgccgagcgagggcgcggtgggccgcagcccatttcctagcttagggagtttgcatagcttgccgggctcggtgaacagcggcagggtgagccggccgcgcttgctgggcgaggacgagtacctgaacgactcgctgctgcagccgccgcgggtcaagaacgccatggccaataacgggatagagagtctggtggacaaactgaaccgctggaagacctacgctcaggaccatagggacgcgcccgcgccgcggcgacagcgccacgaccggcagcggggcctggtgtgggacgacgaggactcggccgacgatagcagcgtgttggacttgggcgggagcggtggggccaacccgttcgcgcatctgcagcccaaactggggcggcggatgttttgaatgaaataaaactcaccaaggccatagcgtgcgttctcttccttgttagagatgaggcgcgcggtggtgtcttcctctcctcctccctcgtacgagagcgtgatggcgcaggcgaccctggaggttccgtttgtgcctccgcggtatatggctcctacggagggcagaaacagcattcgttactcggagctggctccgcagtacgacaccactcgcgtgtacttggtggacaacaagtcggcggacatcgcttccctgaactaccaaaacgaccacagcaacttcctgaccacggtggtgcagaacaacgatttcacccccgccgaggccagcacgcagacgataaattttgacgagcggtcgcggtggggcggtgatctgaagacgattctgcacaccaacatgcccaatgtgaacgagtacatgttcaccagcaagtttaaggcgcgggtgatggtggctagaaagcacccagagaatgtagacaaaacagatttgagtcaggataagcttgaatatgaatggtttgagtttaccctgcccgagggcaacttttccgagaccatgaccatagacctgatgaacaacgccatcttggaaaactacttgcaagtggggcggcaaaatggcgtgctggagagcgatatcggagtcaagtttgacagcaggaatttcaagctgggctgggacccggtgaccaagctggtgatgccaggggtctacacctacgaggcctttcacccggacgtggtgctgctgccgggctgcggggtggacttcacagagagccgcctgagcaacctcctgggcattcgcaagaagcaacctttccaagagggcttcagaatcatgtatgaggatctagaagggggtaacatccccgctctcctggataccaaaaaatatctggatagcaagaaggaacttgaggatgctgccaaggaagctgcaaagcaacagggagatggtgctgtcactagaggcgatacccacctcactgtagctcaagaaaaagcagctgaaaaggagctagtgatcgtaccaattgaaaaggatgagagcaacagaagttacaacctgatcaaggacacccatgacaccatgtaccgaagctggtacctgtcctatacctacggggaccccgagaagggggtgcagtcgtggacgctgctcaccactccggacgtcacctgcggcgcggagcaagtctactggtcgctgccggacctcatgcaagaccccgtcaccttccgctccacccagcaagtcagcaactaccccgtggtcggcgccgagctcatgcccttccgcgccaagagcttttacaacgacctcgccgtctactcccagctcatccgcagctacacctccctcacccacgtcttcaaccgcttccccgacaaccagatcctctgccgcccgcccgcgcccactatcaccaccgtcagtgaaaacgtgcctgctctcacagatcacgggacgctaccgctgcgcagcagtatccgcggagtccagcgagtgaccgtcactgacgcccgtcgccgcacctgtccctacgtctacaaggccctgggcatagtcgcgccgcgtgtgctttccagtcgcaccttctaaaaaaatgtctattctcatctcgcccagcaataacaccggctggggtattactaggcccagcaccatgtacggaggagccaagaaacgctcccagcagcaccccgtccgcgtccgcggccactttcgcgctccctggggagcttacaagcgggggcggactcccgctgccgccgtgcgcaccaccgtcgacgacgtcatcgactcggtggtcgccgacgcgcgcaactacacccccgccccctccaccgtggacgcggtcatcgacagcgtggtggccgacgcgcgcgactatgccagacgcaagagccggcggcgacggatcgccaggcgccacaggagcacgcccgccatgcgcgccgcccgagctctgctgcgccgcgccagacgcacgggccgccgggccatgatgcgagccgcgcgccgcgccgccactgcaccccccgcaggcaggactcgcagacgagcggccgccgccgccgccgcggccatctctagcatgaccagacccaggcgcggaaacgtgtactgggtgcgcgactccgtcacgggcgtgcgcgtgcccgtgcgcacccgtcctcctcgtccctgatctaatgcttgtgtcctcccccgcaagcgacgatgtcaaagcgcaaaatcaaggaggagatgctccaggtcgtcgccccggagatttacggaccaccccaggcggaccagaaaccccgcaaaatcaagcgggttaaaaaaaaggatgaggtggacgagggggcagtagagtttgtgcgcgagttcgctccgcggcggcgcgtaaattggaaggggcgcagggtgcagcgcgtgttgcggcccggcacggcggtggtgttcacgcccggcgagcggtcctcggtcaggagcaagcgtagctatgacgaggtgtacggcgacgacgacatcctggaccaggcggcggagcgggcgggcgagttcgcctacgggaagcggtcgcgcgaagaggagctgatctcgctgccgctggacgaaagcaaccccacgccgagcctgaagcccgtgaccctgcagcaggtgctgccccaggcggtgctgctgccgagccgcggggtcaagcgcgagggcgagagcatgtacccgaccatgcagatcatggtgccaaagcgccggcgcgtggaggacgtgctggacaccgtgaaaatggatgtggagcccgaggtcaaggtgcgccccatcaagcaggtggcgccgggcctgggcgtgcaaaccgtggacattcagatccccaccgacatggatgtcgacaaaaaaccctcgaccagcatcgaggtgcagaccgacccctggctcccagcctccaccgccaccgcctccacttctaccgccgctacggccaccgagcctcccaggaggcgaagatggggcgccgccagccggctgatgcccaactacgtgttgcatccttccatcatcccgacgccgggctaccgcggcacccggtactacgccagccgcaggcgcccagccagcaaacgccgccgccgcaccgccacccgccgccgtctggcccccgcccgcgtgcgccgcgtgaccacgcgccggggccgctcgctcgttctgcccaccgtgcgctaccaccccagcatcctttaatccgtgtgctgtgatactgttgcagagagatggctctcacttgccgcctgcgcatccccgtcccgaattaccgaggaagatcccgccgcaggagaggcatggcaggcagcggcctgaaccgccgccggcggcgggccatgcgcaggcgcctgagtggcggctttctgcccgcgctcatccccataatcgccgcggccatcggcacgatcccgggcatagcttccgttgcgctgcaggcgtcgcagcgccgttgatgtgcgaataaaacctctttagactctgacacacctggtcctgtatatttttagaatggaagacatcaattttgcgtccctggctccgcggcacggcacgcggccgttcatgggcacctggaacgagatcggcaccagccagctgaacgggggcgccttcaattggagcagtgtctggagcgggcttaaaaatttcggctcgacgctccggacctatgggaacaaggcctggaatagtagcacggggcagttgttaagggaaaagctcaaagaccagaacttccagcagaaggtggtggacggcctggcctcgggcattaacggggtggtggacatcgcgaaccaggccgtgcagcgcgagataaacagccgcctggacccgcgaccgcccacggtggtggagatggaagatgcaactcctccgccgcccaaaggcgagaagcggccgcggcccgacgcggaggagacgatcctgcaggtggacgagccgccctcgtacgaggaggccgtgaaggccggcatgcccaccacgcgcatcatcgcgccgctggccacgggtgtaatgaaacccgccacccttgacctgcctccaccacccacgcccgctccaccgaaggcagctccggtcgtgcaggcccccccggtggcgaccgccgtgcgccgcgtccccgcccgccgccaggcccagaactggcagagcacgctgcacagtatcgtgggcctgggagtgaaaagtctgaagcgccgccgatgctattgagagagaggaaagaggacactaaagggagagcttaacttgtatgtgccttaccgccagagaacgcgcgaagatggccaccccatcgatgatgccgcagtgggcgtacatgcacatcgccgggcaggacgcctcggagtacctgagcccgggtctggtgcagtttgcccgcgccaccgacacgtacttcagcctgggcaacaagtttaggaaccccacggtggctcccacccacgatgtgaccacggaccggtcccagcgtctgacgctgcgcttcgtgcccgtggatcgcgaggacaccacgtactcgtacaaggcgcgcttcactctggccgtgggcgacaaccgggtgctagacatggccagcacttactttgacatccgcggcgtcctggaccgcggtcccagcttcaaaccctactcgggcacagcttacaacagcctggcccccaagggcgctcccaattccagtcagtgggaagaaaaaaagagtggagccggaaatcaaaccgaaactcatacgtttggcgttgctcccatgggcggaactaacatcacaattagcggtttgcaaattggaactgaggaagaagatggaaatcctacaaaggagatttttgcagataaaacattccagcctgaacctcaaataggagaagaaaactggcaggacactgagaatttttatggcggtagagctcttaagaaagacaccaaaatgaaaccttgctatggctcttttgccagacctactaacgaaaagggaggtcaagctaagttaaaacttgacgcccaaggtcagtcaactaaagattatgacattgacctggctttctttgactcacctggaggaaatacaacagctggtggtcaagaagagcttaaagcagacattgtcatgtacactgagaatgcttatctggaaacaccagatacccatgtagtttacaagccaggaacctctgatgacagttctgccgccaacttggttcagcaatccatgcccaacagacccaactacattggcttcagagacaactttgtgggtctcatgtattacaacagcactggcaacatgggtgtgctggctggtcaggcctctcagttgaatgccgtggtcgacttacaagacagaaacaccgagctgtcttaccagctcttgctagattctctgggcgacagaaccaggtactttagcatgtggaactctgcggtggacagctatgatcccgacgtcaggatcattgaaaatcacggtgtggaagatgaacttccaaactattgcttcccattggatggctctggcactaattcagcttatcaaggtgttaaagttaaaaatggggaagatggtgatattgagagcgaatgggaaaaagacaccaatgtcgcagctcgtaaccaactgtgcaagggtaacatctttgccatggagatcaacctccaggccaacctgtggaagagttttctgtactcgaacgtggccctgtacctgcccgactcatacaagtacacgccggccaacgtcaagctgcccaccaacaccaacacctacgagtacatgaacggccgcgtggtagccccctcactggtggacgcctacgtcaacatcggcgcccgctggtcgctggaccccatggacaacgtcaaccccttcaaccaccaccgcaatgcgggcctgcgctaccgctccatgcttctgggcaacggccgctacgtgcccttccacatccaagtgccccaaaagttctttgccatcaagaacctgctcctgctccccggctcctacacctacgagtggaacttccgcaaggacgtcaacatgatcctgcagagttccctcggaaacgacctgcgcgtcgacggcgcctccgtccgcttcgacagcatcaacctctacgccaccttcttccccatggcgcacaacaccgcctccaccctggaagccatgctgcgcaacgacaccaacgaccagtccttcaacgactacctctcggccgccaacatgctctaccccatcccggccaaggccaccaacgtgcccatctccatcccctcgcgcaactgggccgccttccgcggctggagtttcacccggctcaagaccaaggaaactccctccctcggctcgggtttcgacccctactttgtctactcgggctccatcccctacctcgacgggaccttctacctcaaccacaccttcaagaaggtttccatcatgttcgactcctcggtcagctggcccggcaacgaccggctgctcacgccgaacgagttcgagatcaagcgcagcgtcgacggggagggctacaacgtggcccaatgcaacatgaccaaggactggttcctcgtccagatgctctcccactacaacatcggctaccagggcttccacgtgcccgagggctacaaggaccgcatgtactccttcttccgcaacttccagcccatgagcaggcaggtggtcgatgagatcaactacaaggactacaaggccgtcaccctgcccttccagcacaacaactcgggcttcaccggctaccttgcacccaccatgcgtcaggggcagccctaccccgccaacttcccctacccgctcatcggctccaccgcagtcccctccgtcacccagaaaaagttcctctgcgacagggtcatgtggcgcatccccttctccagcaacttcatgtccatgggcgccctcaccgacctgggtcagaacatgctctacgccaactcggcccacgcgctcgacatgactttcgaggtggaccccatggatgagcccaccctcctctatcttctcttcgaagttttcgacgtggtcagagtgcaccagccgcaccgcggcgtcatcgaggccgtctacctgcgcacacccttctccgccggcaacgccaccacctaagcatgagcggctccagcgaacgagagctcgcggccatcgtgcgcgacctgggctgcgggccctactttttgggcacccacgacaagcgcttcccgggcttcctcgccggcgacaagctggcctgtgccatcgtcaacacggccggccgcgagaccggaggcgtgcactggctcgccttcggctggaacccgcgctcgcgcacctgctacatgttcgacccatttgggttctcggaccgccggctcaagcagatttacagcttcgagtacgaggctatgctgcgccgcagtgccctggcttcctcgcccgaccgctgtctcagcctcgaacagtccacccagaccgtgcaggggcccgactccgccgcctgcggacttttctgttgcatgttcttgcatgccttcgtgcactggcccgaccgacccatggacggaaaccccaccatgaacttgcttacgggggtgcccaacggcatgctacaatcgccacaggtgctgcccaccctccggcgaaaccaggaggaactctaccgcttcctcgcgcgccactccccttactttcgatcccaccgcgccgccatcgaacacgccaccgcttttgacaaaatgaaacaactgcgtgtatctcaataaacagcacttttattttacatgcactggagtatatgcaagttatttaaaagtcgaaggggttctcgcgctcgtcgttgtgcgccgcgctggggagggccacgttgcggtactggaacttgggctgccacttgaactcggggatcaccagtttgggaaccggaatctcggggaaggtctcgctccacatgcgccggctcatctgcagggcgcccaatatgtcaggcgcggatatcttgaaatcgcagttgggaccggtgctctgcgcgcgcgagttgcggtacacggggttgcagcactggaacaccatcagactggggtgcttcacactggccagcacgctcttgtcgctgatctgatccttgtccaggtcctcggcgttgctcaggccgaacggggtcatcttgcacagctggcggcccaagaagggcacgctctgaggcttgtggttacactcgcagtgaacgggcattagcatcatccccgcgccgcgctgcatattcgggtagagggccttgacaaatgccgagatctgcttgaaagcttgctgggccttggccccctcgctgaaaaacagcccgcagctcttcccgctgaactggttattcccgcaaccggcatcatgcacgcagcagcgcgcgtcatggctggtcagttgcaccacgctccgtccccagcggttctgggtcaccttggccttgctgggctgctccttcaacgcgcgctgcccgttctcgctggtcacatccatctccaccacgtgatccttgtggatcatcaccgttccatgcagacacttgagctggccttccacctcggtgcagccgtgatcccacagggcgcagccggtgcactcccagttcttgtgcgcaatcccgctgtggctgaagatgtaaccttgcaacatgcggcccatgatggtgctaaatgctttctgggtggtgaaggtcagttgcagaccgcgggcctcctcgttcatccaggtctggcacatcttttggaagatctcggtctgttcgggcatgagcttgtaagcatcgcgcaggccgctgtcgacgcggtagcgttccatcagcacgttcatggtatccatgcccttctcccaggacgagaccagaggcagactcagggggttgcgcacgttcaggacaccgggggtcgcgggctcgacgatgcgttttccgtccttgccttccttcaacagaaccggcggctggctgaatcccactcccacgatcacggcttcttcctggggcatctcttcgtcggggtctaccttggtcacatgcttggtctttctggcttgcttcttttttggagggctgtccacggggaccacgtcctcctcggaagacccggagcccacccgctgatactttcggcgcttggtgggcagaggaggtggcggcgaggggctcctctcctgctccggcggatagcgcgctgaaccgtggccccggggcggagtggcctctcggtccatgaaccggcgcacgtcctgactgccgccggccattgtttcctaggggaagatggaggagcagccgcgtaagcaggagcaggaggaggacttaaccacccacgagcaacccaaaatcgagcaggacctgggcttcgaagagccggctcgtctagaacccccacaggatgaacaggagcacgagcaagacgcaggccaggaggagaccgacgctgggctcgagcatggctacctgggaggagaggaggatgtgctgctgaaacacctgcagcgccagtccctcatcctccgggacgccctggccgaccggagcgaaacccccctcagcgtcgaggagctgtgtcgggcctacgagctcaaccttttctcgccgcgcgtgccccccaaacgccagcccaacggcacctgcgagcccaacccgcgtctcaacttctatcccgtctttgcggtccccgaggcccttgccacctatcacatctttttcaagaaccaaaagatcccagtctcctgccgcgccaaccgcacccgcgccgacgcgctcctcgctctggggcccggcgcgcgcatacctgatatcgcttccctggaagaggtgcccaagatcttcgaagggctcggtcgggacgagacgcgcgcggcgaacgctctgaaagaaacagcagaggaagagggtcacactagcgccctggtagagttggaaggcgacaacgccaggctggccgtgctcaagcgcagcgttgagctcacccacttcgcctaccccgccgtcaacctcccgcccaaggtcatgcgtcgcatcatggatcagctcatcatgccccacatcgaggccctcgatgagacccaagagcagcgcccagaggacgcccggcctgtggtcagcgacgagcagctcgcgcgctggctcgggacccgcgacctccagaccctggagcagcggcgcaagctgatgctggccgtggtcctggtcaccctcgagctcgaatgcatgcgccgcttcttcagcgaccccgagaccctgcgcaaggtcgaggagaccctgcactacactttcaggcacggcttcgtcaggcaggcctgcaagatctccaacgtggagctgaccaacctggtctcctgcctggggatcctgcatgagaaccgccttgggcagaccgtgctccactctaccctgaagggcgaggcgcggcgggactatgtccgcgactgcatctttctatttctctgccacacatggcaagcagccatgggcgtgtggcagcagtgtctcgaggacgagaacctaaaggagctggacaagcttcttgctagaaaccttaaaaagctgtggacgggcttcgacgagcgcaccgtcgcctcggacctggccgagatcgtcttccccgagcgcctgaggcagacgctgaaaggcgggctgcccgactttatgagccagagcatgttgcaaaactaccgcactttcattctcgagcgatcggggatcctacccgccacctgcaacgccttcccctccgactttgtcccgctgagctaccgcgagtgtcccccgccgctgtggagccactgctacctcttgcagctggccaactacatcgcctaccactcggacgtgatcgaggacgtgagcggcgaggggctgctcgagtgccactgccgctgcaacctgtgctccccgcaccgctccctggtctgcaacccccagctcctaagcgagacccaggtcatcggtaccttcgagctgcaaggtccggagaagtccaccgctccgctgaaactcacgccggggttgtggacttccgcgtacctgcgcaaatttgtacccgaggactaccacgcccacgagataaagttcttcgaggaccaatcgcgccctcagcacgcggatctcacggcctgcgtcatcacccagggcgcgatcctcgcccaattgcacgccatccaaaaatcccgccaagagtttcttctgaaaaagggtagaggggtctaccttgacccccagacgggcgaggtgctcaacccgggtctcccccagcatgccgaggaagaagcaggagccgctagtggaggagatggaagaagaatgggacagccaggcagaggaggacgaatgggaggaggagacagaggaggaagaattggaagaggtggaagaggagcaggcaacagagcagcccgtcgccgcaccatccgcgccggcagccccgccggtcacggatacaacctccgctccggtcaagcctcctcgtagatgggatcgagtgaagggtgacggtaagcacgagcggcagggctaccgatcatggagggcccacaaagccgcgatcatcgcctgcttgcaagactgcggggggaacatcgctttcgcccgccgctacctgctcttccaccgcggggtgaacatcccccgcaacgtgttgcattactaccgtcaccttcacagctaagaaaaagcaagtaagaggagtcgccggaggaggaggcctgaggatcgcggcgaacgagcccttgaccaccagggagctgaggaaccggatcttccccactctttatgccatttttcagcagagtcgaggtcagcagcaagagctcaaagtaaaaaaccggtctctgcgctcgctcacccgcagttgcttgtaccacaaaaacgaagatcagctgcagcgcactctcgaagacgccgaggctctgttccacaagtactgcgcgctcactcttaaagactaaggcgcgcccacccggaaaaaaggcgggaattacttcatcgccaccatgagcaaggagattcccaccccttacatgtggagctatcagccccagatgggcctggccgcgggcgcctcccaggactactccacccgcatgaactggctcagtgccggcccctcgatgatctcacgggtcaacggggtccgtaaccatcgaaaccagatattgttggagcaggcggcggtcacctccacgcccagggcaaagctcaacccgcgtaattggccctccaccctggtgtatcaggaaatccccgggccgactaccgtactacttccgcgtgacgcactggccgaagtccgcatgactaactcaggtgtccagctggccggcggcgcttcccggtgcccgctccgcccacaatcgggtataaaaaccctggtgatccgaggcagaggcacacagctcaacgacgagttggtgagctcttcgatcggtctgcgaccggacggagtgttccaactagccggagccgggagatcgtccttcactcccaaccaggcctacctaaccttgcagagcagctcttcggagcctcgctccggaggcatcggaaccctccagtttgtggaggagtttgtgccctcggtctacttcaaccccttctcgggatcgccaggcctctacccggacgagttcataccgaacttcgacgcagtgagagaagcggttgacggctacgactgaatgtcctatggtgactcggctgagctcgctcggttgaggcatctggaccactgccgccgcctgcgctgcttcgcccgggagagctgcggactcatctactttgagtttcccgaggagcaccccaacggccctgcacacggagtgcggatcaccgtagagggcaccaccgagtctcacctgatcaggttcttcacccagcaacccttcctggtcgagcgggaccggggcgccaccacctacaccgtctactgcatctgtcctaccccgaagttgcatgagaatttttgctgtactctttgtggtgagtttaataaaagctaaactcttgcaatactctggaccttgtcgtcgtcaactcaacaagaccttcaacctcaccaaccagactgaggtaaaactcaactgcagaccaggggacaaatacatcctctggctctttgagaacacttccttcgcagcctccaacacctgtgccaacgacggtattgaaatacccaacaaccttaccagtggactgacttacaccaccagaaagactaagctagtgctctacaatccttttgtagagggaacctaccactgccagagcggaccttgctaccacactttcactttggtgaacgttaccggcagcagcacagccgctccagaaacatctaaccttctttttgatactaacactcctaaaaccggaggtgagctctgggttccctctctgacagaggggggtaaacatattgaagcggttgggtatttgattttaggggtggtcctgggtgggtgcatagcggtgctgtattaccttccttgctggatcgaaatcaaaatctttatctgctgggtcagacattgttgggaggaaccatgaaggggctcttgctaattatcctttccctggttgggggtgtactgtcatgccacgaacagccacgatgtaacatcaccacaggcaatgagaggagtgtgatatgcacagtagtcatcaaatgcgagcatacatgtcctctcaacatcacattcaagaataagaccatgggaaatgcatgggtgggcgattgggaaccaggagatgagcagaactacacggtcactgtccatggtagcaatggaaatcacactttcggtttcaaattcatttttgaagtcatgtgtgatatcacactgcatgtggctagacttcatggcttgtggccccctaccaaggagaacatggttgggttttctttggcttttgtgatcatggcctgtgcaatgtcaggtctgctggtaggggctataatatggttcctgaggcacaagcccaggtatggaaatctggaaaaggaaaaattgctataatgtttttctttccacagcatcatgaatacagtgatccgtatcgtgctgctctctcttcttgtagcttttagtcaggcaggatttcatactatcaatgctacatggtgggctaatataactttagtggggccctcagatacgccagtcacctggtatgataaacagggaatgcagttctgtgatggaaatacagttaagaatcctcaaataagacatgagtgtaatgagcaaaaccttacactaattcatgtgaacaaaacccatgaaaggacatacatgggttataatagacagagtactcataaggaagactataaagtcatagttataccgcctcctcctgctactgtaaagccacagtcaggtccagagtatgtatatgttaatatgggagagaacaaaaccttagttggacctccaggaataccagttacttggtatgacggagaaggaaataaattctgcgatggagaaaaagttgaacatgcagaatttaatcatacatgtgatgtgcaaaatcttacactgttgtttataaatcttacacatgatggggcttatcttggctataatcaccagggaactaaaagaacttggtatgaggttgtagtgacagatggttttccaaaatcaggggagatgaaaatcgaagatcagagtagacaaacagaacaaaaacaaactgggcaaaaacaaaatgagcataaacagggtgggcagaaacaggaggggcaaaaagagacaagtcaaaagaaagctagtgacaaacagaaggcgacacacaggaggccatcaaaactaaagccgcacacacctgaagcaaaactgattacagtttgtagtgggtctaacttaacattacttgggccagatggaaaggtcacttggtatgatgatgatttaaaaagaccatgcgagcctgggtataagttagagtgtaagtgtgacaatcaaaacctaacactaatcaatgtaactaaactttatgagggagtttactatggtactaatgacagaggcaacagcaaaagatacagagtaaaattaaacactactaattctcaaagtgtgaaaattcagccgtacaacagacctactactcctgatcagaaacacagatttgaattgcaaattgattctaatcaagacaatgacaaaattccatcaaccactgtggcaatcgtggtgggagtgattgcgggcttcataactataatcattgtcattctgtgctacatctgctgccgcaagcgtcccagggcatacaatcatatggtagacccactactcagcttctcttactgagactcagtcactttcatttcagaaccatgaaggctttcacagcttgcgttctgattagcatagtcacattagtatcagctgattacaaacaagttcaagttagcagaggaggaaatattacattagatggaccattcgataatactacatggacaagatatcataatgatggacataaaaatggttggatgaaaatttgcacatggactggagcaacatataaatgtcacaataatggaagcattactatttttgctttcaacattacatccggagtttacaaagcagaagggtataaaaaagaagttagaacattttcatctagaaatcaaaaacatacaattgaagattctggagattatgaacaacaaaaaatatatctatataatctaacaataattgaaccgccaactactaaagcacccaccacagttagaacaaccacgcagacaactactagggaaacaacacagcctactactgtacccactacacatccaaccaccacagtcagtacaactactgacaccacaactcacactacacatctagacactacagtgcagaatactactttattgattgggtttttactaagaggaaatgaaagtactactgatcagacagaggctacctcaagtgccttcagcagcactgcaaatttaacttcgcttgcttcggtaaatgagacgatcgtgccgatgatgtatggccaacattacccaggtttggatatacaaattactttcctgattgtctgtggggtctttatcctcgctgtccttctctactttgtctgctgcaaggccagagaaaaatctaggcggcccatctacaggccagtaatcggggaacctcagccactccaagtggatggaggcttaaggaatcttctcttctcttttacagtatggtgatcagccatgattcctaggttcttcctatttaacatcctcttctgtctcttcaacatctgcgctgccttcgcggccgtctcgcacgcctcacccgactgtctcgggcccttccccacctacctcctctttgccctgctcacctgcacctgcgtctgcagcattgtctgcctggtcatcaccttcctgcagctcatcgactggtgctgcgcgcgctacaattacctgcatcacagtcccgaatacagggacgagaacgtagccagaatcttaaggctcatatgaccatgcagactgtgctcatactgctatcactcctatcccatgccctcgctactgctgattactctaaatgcaaattcgcggacatatggaatttcttagactgctatcaggagaaaatggatatgccttcctattacttggtgattgttggggtagtcatggtctgctcctgcactttctttgccatcatgatctacccctgttttgatctcggctggaattctgttgaggcattcacatacacactagaaagcagttcactagcctccacgccaccacccacaccgcctccccgcagaaatcagtttcccatgattcagtacttagaagagccccctccccgacccccttccactgttagctactttcacataaccggcggcgatgactgaccacttggacctcgagatggacggccaggcctccgagcagcgcaccctgcaactgcgcgtccgtcagcagcaggagcgggccgccaaggagctcctcgatgccatcaacatccaccagtgcaagaagggcatcttctgcctggtcaaacaggcaaagatcacctacgagctcgtgtccggcggcaagcagcatcgcctcgcctatgagctgccccagcagaagcagaagttcacctgcatggtgggcatcaaccccatagtcatcacccagcagtcgggcgaggccagcggctgcatccactgctcctgcgaaagccccgagtgcatctactccctactcaagaccctttgcggactccgcgaccttctccccatgaactgatgttgattaaaagcccagaaaccaatcagccccttaccccattcccctcccacaattactcataagaataaatcattggaattaatgtttcaataaagatcacttacttgaaatctgaaagtatgtctctggtgtagttgttcagcaacacctcagtaccctcctcccagctctggtactcaagtccccggcgggcggcaaactttctccacaccttgaaagggatgtcaaattcctggtccacaattttcattgtcttccctctcagatgtcaaagaggctccgggtggaagatgacttcaaccccgtctacccctatggctacgcgcggaatcagaatatccccttcctcactcccccctttgtctcctccgatggattccaaaactttccccctggtgtgctgtcactcaaattggctgacccaatcactatcagtaatggcgatgtctcactcaaggtgggagggggactcactgtggaacaagatagtggaaacctaagtgtgaaccctaaggctccattgcaagttggaacagacaaaaaactggaattggctttagcacctccatttaatgttaaagataacaagctagatctgctagtaggagatggattaaaggtaatagataaatcaatatctgaattgccaggattgttaaactatcttgtagttttgactggcaaaggaattggaaatgaagaattaaaaaatgacgatggtagcaataaaggagtcggtttatgtgtgagaattggagaaggaggtggtttaacttttgatgataaaggttatttagtagcatggaacaagaaacatgacatccgcacactttggacaactttagacccttctccaaattgtagaattgatgtggacaaggactctaaactaacattggtccttacaaagtgcggaagtcagatattggctaatgtatctcttcttgttgtcaaaggaaggtttcaaaacctaaattacaaaacaaacccaaaccttcctaaaacatttacaataaaattactgtttgatgaaaatgggattcttaaagactcatcaaatcttgacaagaactattggaactatagaaacggaaattctattttagcagagcaatataaaaatgcagttggctttatgccaaatttagcagcttatcccaaatctaccaccactcagtctaaactttatgcaagaaacactatttttggaaatatttacctagattcgcaagcatataatccagtggttattaaaattacttttaatcaagaagcagatagtgcttattctatcactttaaactattcatggggtaaggattatgaaaatatcccttttgattctacttcttttaccttttcctatatcgcccaagaatgaaagaccaataaacgtgtttttcatttgaaaattttcatgtatctttattgatttttacaccagcacgggtagttagtctcccaccaccagcccatttcacagtgtacacggttctttcagcacgggtggccttaaatagggaaatgttctgattagtgcgggaacttgacttggggtctataatccacacagtttcctggcgagccaaacgggggtcggtgattgagatgaagccgtcctctgaaaagtcatccaagcgggcctcacagtccaaggtcacagtctggtggaatgagaagaacgcacagattcatactcggaaaacaggatgggtctgtgcctctccatcagcgccctcaacagtctctgccgccggggctcggtgcggctgctgcagatgggatcgggatcgcaagtctctctgactatgatccccacagccttcagcatcagtctcctggtgcgtcgggcacagcaccgcatcctgatctctgccatgttctcacagtaagtgcagcacataatcaccatgttattcagcagcccataattcagggcgctccagccaaagctcatgttggggattattgaacccacgtgaccatcgtaccagatgcggcagtatatcaggtgcctgcccctcatgaacacactgcccatatacatgatctctttgggcatgtttctgttcacaatctggcggtaccatgggaatcgctggttgaacatgcacccgtaaatgactctcctgaaccacacggccagcagggtgcctcccgcccgacactgcagggagcccggggatgaacagtggcaatgcaggatccagcgctcgtacccgctcaccatctgagctctcaccaagtccagggtagcggggcacaggcacactgacatacatctttttaaaatttttatttcctctggggtcaggatcatatcccaggggactggaaactcttggagcagggtaaatccagcagcacatggtaatccacggacagaacttacattatgataatctgcatgatcacaatcgggcaacagggggtgttgttcagttagtgaggccctagtctcctcctcacatcgtggtaaacgggccctgcggtaaggatgatggcggagcgagctcgactgttcctcggtggacattgaaatggattctcttgcgtaccttgtcgtacttctgccagcagaaagtggctcgggaacagcagatacctttcctcctgctgtccttccgctgctgacgctcagtcatccaactgaagtacagccattcccgcaggttctccagcagctcctgtgcatctgatgaaacaaaagtcccgtcgatgcggattccccttaaaacatcagccaggacattgtaggccatcccaatccagttaatgcatcctgatctatcatgaagaggaggtgggggaagaactggaagaaccatttttattccaagcggtctcgaaggacgataaagtgcaagtcacgcaggtgacagcgttccccgccgctgtgctggtggaaacagacagccaggtcaaaacccactctattttcaaggtgctcgactgtggcttcgagcagtggctctacgcgtacatccagcataagaatcacattaaaggctggacctccatcgatttcatcaatcatcaggttacactcattcaccatccccaggtaattctcatttttccagccttggattatttctacaaattgttggtgtaagtccactccgcacatgtggaaaagttcccacagcgccccctccactttcataatcaggcagaccttcatattagaaacagatcctgctgctccaccacctgcagcgtgttcaaaacaacaagattcaatgaggttctgccctctgccctcagctcacgtctcagcgtcagctgcaaaaagtcactcaagtcctcagccactacagctgacaattcagagccagggctaagcgtgggactggcaagcgtgagtgagtactttaatgctccaaagctagcacccaaaaactgcatgctggaataagctctctttgtgtcaccggtgatgccttccaataggtgagtgataaagcgaggtagtttttctttaatcatttgagtaatagaaaagtcctctaaataagtcactaggaccccaggaaccacaatgtggtagctgacagcgtgtcgctcaagcatggttagtagagatgagagtctgaaaaacagaaagcatgcactaaaccagagttgccagtctcactgaaggaaaaatcactctctccagcagcaaagtgcccactgggtggccctctcggacatacaaaaatcgatccgtgtggttaaagagcagcacagttagctcctgtcttctcccagcaaagatcacatcggactgggttagtatgcccctggaatggtagtcattcaaggccataaatctgccttggtagccattaggaatcagcacgctcactctcaagtgaaccaaaaccaccccatgcggaggaatgtggaaagattctgggcaaaaaaaggtatatctattgctagtcccttcctggacgggagcaatccctccagggctatctatgaaagcatacagagattcagccatagctcagcccgcttaccagtagacagagagcacagcagtacaagcgccaacagcagcgactgactacccactgacccagctccctatttaaaggcaccttacactgacgtaatgaccaaaggtctaaaaaccccgccaaaaaaacacacacgccctgggtgtttttcgcgaaaacacttccgcgttctcacttcctcgtatcgatttcgtgactcaacttccgggttcccacgttacgtcacttctgcccttacatgtaactcagccgtagggcgccatcttgcccacgtccaaaatggcttccatgtccggccacgcctccgcggcgaccgttagccgtgcgtcgtgacgtcatttgcatcaccgtttctcgaccaatcagcgacgaccccaccctaaattcaaaagctcatttgcatattaacttttgtttactttgtggggtatattattgatgatg

SEQ ID NO: 26 - DNA, 35132 bp, Adenovirus D26
  MISC_FEATURE (1)..(35132): Complete Genome
catcatcaataatataccccacaaagtaaacaaaagttaatatgcaaatgaggttttaaatttagggcggggctactgctgattggacgagaaacggtgatgcaaatgacgtcacgacgcacggctaacggtcgccgcggaggcgtggcctagcccggaagcaagtcgcggggctgatgacgtataaaaaagcggactttagacccggaaacggccgattttcccgcggccacgcccggatatgaggtaattctgggcggatgcaagtgaaattaggtcattttggcgcgaaaactgaatgaggaagtgaaaagcgaaaaataccggtccctcccagggcggaatatttaccgagggccgagagactttgaccgattacgtgggggtttcgattgcggtgtttttttcgcgaatttccgcgtccgtgtcaaagtccggtgtttatgtcacagatcagctgatccgcagggtatttaaaccagtcgagtccgtcaagaggccactcttgagtgccagcgagtagagatttctctgagctccgctcccagagaccgagaaaaatgagacacctgcgcctcctgccttcaactgtgcccggtgagctggctgtgcttatgctggaggactttgtggatacagtattggaggacgaactgcatccaagtccgttcgagctgggacccacacttcaggatctctatgatctggaggtagatgcccatgatgacgaccctaacgaggaggctgtgaatttaatatttccagaatctatgattcttcaggctgacatagccaacgaatctactccacttcatacaccgactctgtcacccatacctgaattggaagaggaggacgaactagacctccggtgttatgaggaaggttttcctcccagcgattcagaggatgaacggggtgagcagaccatggctctgatctcagactatgcttgtgtgattgtggaggaacaagtagtgattgaaaattctaccgagccagtggagggctgtagaaaatgccagtaccaccgggataagtctggagacccgaacgcatcatgcgctttgtgctatatgaaacagactttcagctttatttacagtaagtggagtgaatgtgagagaggctgagtgcttaacacatcactgtgtattgcttgaacagctgtgctaagtgtggtttatttttgtttctaggtccggtgtcagaggatgagtcatcaccctcagaagaagaccacccgtctccccctgatctcacagatgacacgcccctgcaagtgcacagacccaccccagtcagagccagtggcgagaggcgagcagctgttgaaaaaattgaggacttgttacatgacatgggtggggatgaacctttggacctgagcttgaaacgccccaggaactaggcgcagctgcgcttagtcatgtgtaaataaagttgtacaataaaagtatatgtgacgcatgcaaggtgtggtttatgactcatgggcggggcttagtcctatataagtggcaacacctgggcactgggcacagaccttcagggagttcctgatggatgtgtggactatccttgcagactttagcaagacacgccggcttgtagaggatagttcagacgggtgctccgggttctggagacactggtttggaactcctctatctcgcctggtgtacacagttaagaaggattataaagaggaatttgaaaatatttttgctgactgctctggcctgctagattctctgaatcttggccaccagtcccttttccaggaaagggtactccacagccttgatttttccagcccagggcgcactacagccggggttgcttttgtggtttttctggttgacaaatggagccaggacacccaactgagcaggggctacatcctggacttcgcagccatgcacctgtggagggcctggatcaggcagcggggacagagaatcttgaattactggcttctacagccagcagctccgggtcttcttcgtctacacagacaaacatccatgttggaggaagaaatgaggcaggccatggacgagaacccgaggagcggcctggaccctccgtcggaagaggagctggattgaatcaggtatccagcctgtacccagagcttagcaaggtgctgacatccatggccaggggagttaagagggagaggagcgatgggggtaataccgggatgatgaccgagctgacggccagcctgatgaatcggaagcgcccagagcgccttacctggtacgagctacagcaggagtgcagggatgagttgggcctgatgcaggataaatatggcctggagcagataaaaacccattggttgaacccagatgaggattgggaggaggctattaagaagtatgccaagatagccctgcgcccagattgcaagtacatagtgaccaagaccgtgaatatcagacatgcctgctacatctcggggaacggggcagaggtggtcatcgataccctggacaaggccgccttcaggtgttgcatgatgggaatgagagcaggagtgatgaatatgaattccatgatcttcatgaacatgaagttcaatggagagaagtttaatggggtgctgttcatggccaacagccacatgaccctgcatggctgcagtttcttcggcttcaacaatatgtgcgcagaggtctggggcgcttccaagatcaggggatgtaagttttatggctgctggatgggcgtggtcggaagacccaagagcgagatgtctgtgaagcagtgtgtgtttgagaaatgctacctgggagtctctaccgagggcaatgctagagtgagacactgctcttccctggagacgggctgcttctgcctggtgaagggcacagcctctctgaagcataatatggtgaagggctgcacggatgagcgcatgtacaacatgctgacctgcgattcgggggtctgccatatcctgaagaacatccatgtgacctcccaccccagaaagaagtggccagtgtttgagaataacctgctgatcaagtgccatatgcacctgggagccagaaggggcaccttccagccgtaccagtgcaactttagccagaccaagctgctgttggagaacgatgccttctccagggtgaacctgaacggcatctttgacatggatgtctcggtgtacaagatcctgagatacgatgagaccaagtccagggtgcgcgcttgcgagtgcgggggcagacacaccaggatgcagccagtggccctggatgtgaccgaggagctgagaccagaccacctggtgatggcctgtaccgggaccgagttcagctccagtggggaggatacagattagaggtaggtttgagtagtgggcgtggctaaggtgactataaaggcgggtgtcttacgagggtctttttgcttttctgcagacatcatgaacgggactggcggggccttcgaaggggggctttttagcccttatttgacaacccgcctgccgggatgggccggagttcgtcagaatgtgatgggatcgacggtggatgggcgcccagtgcttccagcaaattcctcgaccatgacctacgcgaccgtggggaactcgtcgctcgacagcaccgccgcagccgcggcagccgcagccgccatgacagcgacgagactggcctcgagctacatgcccagcagcggtagtagcccctctgtgcccagttccatcatcgccgaggagaaactgctggccctgctggccgagctggaagccctgagccgccagctggccgccctgacccagcaggtgtccgagctccgcgaacagcagcagcagcaaaataaatgattcaataaacacagattctgattcaaacagcaaagcatctttattatttattttttcgcgcgcggtaggccctggtccacctctcccgatcattgagagtgcggtggattttttccaggacccggtagaggtgggattggatgttgaggtacatgggcatgagcccgtcccgtgggtggaggtagcaccactgcatggcctcgtgctctggggtcgtgttgtagatgatccagtcatagcaggggcgctgggcgtggtgctggatgatgtccttgaggaggagactgatggccacggggagccccttggtgtaggtgttggcaaaacggttgagctgggagggatgcatgcggggggagatgatgtgcagtttggcctggatcttgaggttggcgatgttgccacccagatcccgccgggggttcatgttgtgcaggaccaccagaacggtgtagcccgtgcacttggggaacttgtcatgcaacttggaagggaatgcgtggaagaatttggagacgcccttgtgcccgcccaggttttccatgcactcatccatgatgatggcaatgggcccgtgggctgcggctttggcaaagacgtttctggggtcagagacatcgtaattatgctcctgggtgagatcatcataagacattttaatgaatttggggcggagggtgccagattgggggacgatggttccctcgggccccggggcgaagttcccctcgcagatctgcatctcccaggctttcatctcggagggggggatcatgtccacctgcggggcgatgaaaaaaacggtttccggggcgggggtgatgagctgcgaggagagcaggtttctcaacagctgggacttgccgcacccggtcgggccgtagatgaccccgatgacgggttgcaggtggtagttcaaggacatgcagctgccgtcgtcccggaggaggggggccacctcgttgagcttgtctctgacttggaggttttcccggacgagctcgccgaggaggcggtccccgcccagcgagagaagctcttgcagggaagcaaagtttttcaggggcttgagcccgtcggccatgggcatcttggcgagggtctgcgagaggagctccaggcggtcccagagctcggtgacgtgctctacggcatctcgatccagcagacttcctcgtttcgggggttgggacgactgcgactgtagggcacgagacgatgggcgtccagcgcggccagcgtcatgtccttccagggtctcagggtccgcgtgagggtggtctccgtcacggtgaaggggtgggccgcgggctgggcgcttgcaagggtgcgcttgagactcatcctgctggtgctgaaacgggcacggtcttcgccctgcgcgtcggcgagatagcagttgaccatgagctcgtagttgagggcctcggcggcgtggcccttggcgcggagcttgcccttggaagagcgcccgcaggcgggacagaggagggattgcagggcgtagagcttgggcgcgagaaagacggactcgggggcgaaggcgtccgctccgcagtgggcgcagacggtctcgcactcgactagccaggtgagctcgggctgctcggggtcaaaaaccagttttcccccgttctttttgatgcgcttcttacctcgcgtctccatgagtctgtgtccgcgctcggtgacaaacaggctgtctgtgtccccgtagacggacttgatgggcctgtcctgcaggggcgtcccgcggtcctcctcgtagagaaactcagaccactctgagacgaaggcgcgcgtccacgccaagacaaaggaggccacgtgcgaggggtagcggtcgttgtccaccagggggtccaccttttccacggtatgcaggcacatgtccccctcctccgcatccaagaaggtgattggcttgtaggtgtaggccacgtgacctggggttcccgacgggggggtataaaagggggcgggtctgtgctcgtcctcactctcttccgcgtcgctgtccacgagcgccagctgttggggtaggtattccctctcaagagcgggcatgacctcggcactcaggttgtcagtttctagaaacgaggaggatttgatgtgggcctgccctgccgcgatgctttttaggagactttcatccatctggtcagaaaagactatttttttattgtcaagcttggtggcgaaggagccatagagggcgtttgagagaagcttggcgatggatctcatggtctgatttttgtcacggtcggcgcgctccttggccgcgatgttgagctggacatattcgcgcgcgacacacttccattcggggaagacggtggtgcgctcgtcgggcacgatcctgacgcgccagccgcggttatgcagggtgaccaggtccacgctggtggccacctcgccgcgcaggggctcgttggtccagcagagtctgccgcccttgcgcgagcagaacgggggcagcacatcaagcagatgctcgtcaggggggtccgcatcgatggtgaagatgcccggacagagttccttgtcaaaataatcgatttttgaggatgcatcgtccaaggccatctgccactcgcgggcggccagcgctcgctcgtaggggttgaggggcggaccccaaggcatgggatgcgtgagggcggaggcgtacatgccgcagatgtcatagacatagatgggctccgagaggatgccgatgtaggtgggatagcagcgccccccgcggatgcttgcgcgcacgtagtcatacaactcgtgcgagggggccaagaaggcggggccgagattggtgcgctggggctgctcggcgcggaagacgatctggcgaaagatggcgtgcgagttggaggagatggtgggccgttggaagatgttaaagtgggcgtgaggcaggcggaccgagtcgcggatgaagtgcgcgtaggagtcttgcagcttggcgacgagctcggcggtgacgaggacgtccatggcgcagtagtccagcgtttcgcggatgatgtcataactcgcctctcctttcttctcccacagctcgcggttgagggcgtattcctcgtcatccttccagtactcccggagcgggaatcctcgatcgtccgcacggtaagagcccagcatgtagaaatggttcacggccttgtagggacagcagcccttctccacggggagggcgtaagcttgagcggccttgcggagcgaggtgtgcgtcagggcaaaggtgtccctgaccatgactttcaagaactggtacttgaagtccgagtcgtcgcagccgccgtgctcccagagctcgaaatcggtgcgcttcttcgagagggggttaggcagagcgaaagtgacgtcattgaagagaatcttgcctgcccgcggcatgaaattgcgggtgatgcggaaagggcccgggacggaggctcggttgttgatgacctgggcggcgaggacgatctcgtcaaagccgttgatgttgtgcccgacgatgtagagttccatgaatcgcgggcggcctttgatgtgcggcagctttttgagctcctcgtaggtgaggtcctcggggcattgcaggccgtgctgctcgagcgcccactcctggagatgtgggttggcttgcatgaaggaagcccagagctcgcgggccatgagggtctggagctcgtcgcgaaagaggcggaactgctggcccacggccatcttttctggggtgacgcagtagaaggtgagggggtcccgctcccagcgatcccagcgtaaacgcacggcgagatcgcgagcgagggcgaccagctctgggtccccggagaatttcatgaccagcatgaaggggacgagctgcttgccgaaggaccccatccaggtgtaggtttctacatcgtaggtgacaaagagccgctccgtgcgaggatgagagccgattgggaagaactggatttcctgccaccagttggacgagtggctgttgatgtgatgaaagtagaaatcccgccggcgaaccgagcactcgtgctgatgcttgtaaaagcgtccgcagtactcgcagcgctgcacgggctgtacctcatccacgagatacacagcgcgtcccttgaggaggaacttcaggagtggcggccctggctggtggttttcatgttcgcctgcgtgggactcaccctggggctcctcgaggacggagaggctgacgagcccgcgcgggagccaggtccagatctcggcgcggcgggggcggagagcgaagacgagggcgcgcagttgggagctgtccatggtgtcgcggagatccaggtccgggggcagggttctgaggttgacctcgtagaggcgggtgagggcgtgcttgagatgcagatggtacttgatttctacgggtgagttggtggtcgtgtccacgcattgcatgagcccgtagctgcgcggggccacgaccgtgccgcggtgcgcttttagaagcggtgtcgcggacgcgctcccggcggcagcggcggttccggccccgcgggcaggggcggcagaggcacgtcggcgtggcgctcgggcaggtcccggtgctgcgccctgagagcgctggcgtgcgcgacgacgcggcggttgacatcctggatctgccgcctctgcgtgaagaccacgggccccgtgactttgaacctgaaagacagttcaacagaatcaatctctgcgtcattgacggcggcctgacgcaggatctcttgcacgtcgcccgagttgtcctggtaggcgatctcggacatgaactgttcgatctcctcctcctggagatcgccgcggcccgcgcgctccacggtggcggcgaggtcattggagatgcgacccatgagctgcgagaaggcgcccaggccgctctcgttccagacgcggctgtagaccacgtccccgtcggcgtcgcgcgcgcgcatgaccacctgcgcgaggttgagctccacgtgccgcgcaaagacggcgtagttgcgcaggcgctggaagaggtagttgagggtggtggcgatgtgctcggtgacgaagaagtacatgatccagcggcgcaggggcatctcgctgatgtcgccgatggcttccagcctttccatggcctcgtagaagtccacggcgaagttgaaaaactgggcgttgcgggccgagaccgtgagctcgtcttccaggagccggatgagttcggcgatggtggcgcgcacctcgcgctcgaaatccccgggggcctcctcctcttcctcttcttccatgacgacctcttcttctatttcttcctctgggggcggtggtggtggcgggggccgacgacgacggcgacgcaccgggagacggtcgacgaagcgctcgatcatctccccgcggcggcgacgcatggtttcggtgacggcgcgaccccgttcgcgaggacgcagcgtgaagacgccgccggtcatctcccggtaatggggcgggtccccattgggcagcgatagggcgctgacgatgcatcttatcaattgcggtgtaggggacgtgagcgcgtcgagatcgaccggatcggagaatctttcgaggaaagcgtctagccaatcgcagtcgcaaggtaagctcaaacacgtagcagccctgcggacgctgttagaattgcggttgctgatgatgtaattgaagtaggcgtttttgaggcggcggatggtggcgaggaggaccaggtccttgggtccagcttgctggatgcggagccgctcggccatgccccaggcctggccctgacaccggctcaggttcttgtagtagtcatgcatgagcctctcaatgtcatcactggctgaggcggagtcttccatgcgggtgaccccgacgcccctgagcggctgcacgagcgccaggtcggcgacgacgcgctcggcgaggatggcctgttgcacgcgggtgagggtgtcctggaagtcgtccatgtcgacgaagcggtgataggccccggtgttgatggtgtaggtgcagttggccatgagcgaccagttgacggtctgcaggcctggctgcacgacctcggagtacctgagccgcgagaaggcgcgcgagtcgaagacgtagtcgttgcaggtgcgcacgaggtactggtatccgactaggaagtgcggcggcggctggcggtagagcggccagcgctgggtggccggcgcgcccggggccaggtcctcgagcatgaggcggtggtagccgtagaggtagcgggacatccaggtgatgccggcggcggtggtggaggcgcgcgggaactcgcggacgcggttccagatgttgcgcagcggcaggaaatagtccatggtcggcacggtctggccggtgagacgcgcgcagtcattgacgctctagaggcaaaaacgaaagcggttgagcgggctcttcctccgtagcctggcggaacgcaaacgggttaggccgcgtgtgtaccccggttcgagtcccctcgaatcaggctggagccgcgactaacgtggtattggcactcccgtctcgacccgagcccgatagccgccaggatacggcggagagccctttttgccggccgaggggggtcgctagacttgaaagcgaccgaaaaccctgccgggtagtggctcgcgcccgtagtctggagaagcatcgccagggttgagtcgcggcagaacccggttcgaggacggccgcggcgagcgggacttggtcaccccgccgatataaagacccacagccagccgacttctccagttacgggagcgagcccccttttttctttttgccagatgcatcccgtcctgcgccaaatgcgtcccacccccccggcgaccaccgcgaccgcggccgtagcaggcgccggcgctagccagccaccacagacagagatggacttggaagagggcgaagggctggcaagactgggggcgccgtccccggagcgacatccccgcgtgcagctgcagaaggacgtgcgcccggcgtacgtgcctacgcagaacctgttcagggaccgcagcggggaggagcccgaggagatgcgcgactgccggtttcgggcgggcagggagctgcgcgagggcctggaccgccagcgcgtgctgcgcgacgaggatttcgagccgaacgagcagacggggatcagccccgcacgcgcgcacgtggcggcagccaacctggtgacggcctacgagcagacggtgaagcaggagcgcaacttccaaaagagtttcaacaaccacgtgcgcacgctgatcgcgcgcgaggaggtggccctgggcctgatgcacctgtgggacctggcggaggccatcgtgcagaacccggacagcaagcctctgacggcgcagctgttcctggtggtgcagcacagcagggacaacgaggcgttcagggaggcgctgctgaacatcgccgagcccgagggtcgctggctgctggagctgattaacatcttgcagagcatcgtagtgcaggagcgcagcctgagcctggccgagaaggtggcggcgatcaactactcggtgctgagcctgggcaagttttacgcgcgcaagatttacaagacgccgtacgtgcccatagacaaggaggtgaagatagacagcttttacatgcgcatggcgctcaaggtgctgacgctgagcgacgacctgggcgtgtaccgcaacgaccgcatccacaaggccgtgagcacgagccggcggcgcgagctgagcgaccgcgagctgatgctgagtctgcgccgggcgctggtagggggcgccgccggcggcgaggagtcctacttcgacatgggtgcggacctgcattggcagccgagccggcgcgccttggaggccgcctacggttcagaggacttggatgaggaagaggaagaggaggaggatgcacccgctgcggggtactgacgcctccgtgatgtgtttttagatgtcccagcaagccccggaccccgccataagggcggcgctgcaaagccagccgtccggtctagcatcggacgactgggaggccgcgatgcaacgcatcatggccctgacgacccgcaaccccgagtcctttagacaacagccgcaggccaacagactctcggccattctggaggcggtggtcccctctcggaccaaccccacgcacgagaaggtgctggcgatcgtgaacgcgctggcggagaacaaggccatccgtcccgacgaggccgggctggtgtacaacgccctgctggagcgcgtgggccgctacaacagcacgaacgtgcagtccaacctggatcggctggtgacggacgtgcgcgaggccgtggcgcagcgcgagcggttcaagaacgagggcctgggctcgctggtggcgctgaacgccttcctggcgacgcagccggcgaacgtgccgcgcgggcaggacgattacaccaactttatcagcgcgctgcggctgatggtgaccgaggtgccccagagcgaggtgtaccagtctggcccggactactttttccagacgagccggcagggcttgcagacggtgaacctgagccaggctttcaagaatctgcgcgggctgtggggcgtgcaggcgcccgtgggcgaccggtcgacggtgagcagcttgctgacgcccaactcgcggctgctgctgctgctgatcgcgcccttcaccgacagcggcagcgtgaaccgcaactcgtacctgggccacctgctgacgctgtaccgcgaggccataggccaggcgcaggtggacgagcagaccttccaggagatcactagcgtgagccgcgcgctggggcagaacgacaccgacagtctgagggccaccctgaactttttgctgaccaatagacagcagaagatcccggcgcagtacgcactgtcggccgaggaggaaaggattctgagatatgtgcagcagagcgtagggctgttcctgatgcaggagggtgccacccccagcgccgcgctggacatgaccgcgcgcaacatggaacctagcatgtacgccgccaaccggccgttcatcaataagctgatggactacttgcaccgcgcggcggccatgaacacggactactttaccaacgccatcctgaacccgcactggctcccgccgccggggttctacacgggcgagtacgacatgcccgaccccaacgacgggttcctgtgggacgacgtggacagcgcggtgttctcgccgacctttcaaaagcgccaggaggcgccgccgagcgagggcgcggtggggaggagcccctttcctagcttagggagtttgcatagcttgccgggctcggtgaacagcggcagggtgagccggccgcgcttgctgggcgaggacgagtacctgaacgactcgctgctgcagccgccgcgggccaagaacgccatggccaataacgggatagagagtctggtggacaaactgaaccgctggaagacctacgctcaggaccatagggacgcgcccgcgccgcggcgacagcgccacgaccggcagcggggcctggtgtgggacgacgaggactcggccgacgatagcagcgtgttggacttgggcgggagcggtggggtcaacccgttcgcgcatctgcagcccaaactggggcgacggatgttttgaatgaaataaaactcaccaaggccatagcgtgcgttctcttccttgttagagatgaggcgcgcggtggtgtcttcctctcctcctccctcgtacgagagcgtgatggcgcaggcgaccctggaggttccgtttgtgcctccgcggtatatggctcctacggagggcagaaacagcattcgttactcggagctggctccgcagtacgacaccactcgcgtgtacttggtggacaacaagtcggcggacatcgcttccctgaactaccaaaacgaccacagcaacttcctgaccacggtggtgcagaacaacgatttcacccccgccgaggccagcacgcagacgataaattttgacgagcggtcgcggtggggcggtgatctgaagaccattctgcacactaacatgcccaatgtgaacgagtacatgttcaccagcaagtttaaggcgcgggtgatggtgtctaggaagcatccagagggggtagttgaaacagatttgagtcaggataagcttgaatatgagtggtttgagtttaccctgcccgagggaaacttttccgagaccatgaccatagacctgatgaacaacgccatcttggaaaactacttgcaagtggggcggcagaatggcgtgctggagagcgatatcggagtcaagtttgacagcagaaatttcaagctgggctgggacccggtgaccaagctggtgatgccaggggtctacacctacgaggccttccacccggacgtggtgctgctgccgggctgcggggtggacttcaccgagagccgcctgagcaacctcctgggcattcgcaagaagcaacctttccaagagggcttcagaatcatgtatgaggatctagaaggtggcaacatccccgccctccttgatgtgcccaagtacttggaaagcaagaagaaagttgaagacgaaactaaaaatgcagctgcggccacagccgatacaaccactaggggtgatacatttgcaactccagcgcaagagacagcagctgataagaaggtagaagtcttgcccattgaaaaggatgagagcggtagaagttacaacctgatccaggggacccacgacacgctgtaccgcagttggtacctgtcctatacctacggggaccccgagaagggggtgcagtcgtggacgctgctcaccaccccggacgttacctgcggcgcggagcaagtctactggtcactgccggacctcatgcaagaccccgtcaccttccgctccacccagcaagtcagcaactaccccgtggtcggcgccgagctcatgcccttccgcgccaagagcttttacaacgacctcgccgtctactcccagctcatccgcagctacacctccctcacccacgtcttcaaccgcttccccgacaaccagatcctctgccgcccgcccgcgcccaccatcaccaccgtcagtgaaaacgtgcctgctctcacagatcacgggacgctaccgctgcgcagcagtatccgcggagtccagcgagtgaccgtcactgacgcccgtcgccgcacctgtccctacgtctacaaggccctgggcatagtcgcgccgcgcgtgctttccagtcgcaccttctaaaaaaatgtctattctcatctcgcccagcaataacaccggctggggtcttactagacccagcaccatgtacggaggagccaagaagcgctcccagcagcaccccgtccgcgtccgcggccacttccgcgctccctggggcgcttacaagcgcgggcggacttccaccgccgccgtgcgcaccaccgtcgacgacgtcatcgactcggtggtcgccgacgcgcgcaactacactcccgccccctccaccgtggacgcggtcatcgacagcgtggtggccgacgcgcgcgactatgccagacgcaagagccggcggcgacggatcgccaggcgccaccggagcacgcccgccatgcgcgccgcccgggctctgctgcgccgcgccagacgcacgggccgccgggccatgatgcgagccgcgcgccgcgctgccactgcacccacccccgcaggcaggactcgcagacgagcggccgccgccgccgctgcggccatctctagcatgaccagacccaggcgcggaaacgtgtactgggtgcgcgactccgtcacgggcgtgcgcgtgcccgtgcgcacccgtcctcctcgtccctgatctaatgcttgtgtcctcccccgcaagcgacgatgtcaaagcgcaaaatcaaggaggagatgctccaggtcgtcgccccggagatttacggaccaccccaggcggaccagaaaccccgcaaaatcaagcgggttaaaaaaaaggatgaggtggacgagggggcagtagagtttgtgcgcgagttcgctccgcggcggcgcgtaaattggaaggggcgcagggtgcagcgcgtgttgcggcccggcacggcggtggtgttcacgcccggcgagcggtcctcggtcaggagcaagcgtagctatgacgaggtgtacggcgacgacgacatcctggaccaggcggcggagcgggcgggcgagttcgcctacgggaagcggtcgcgcgaagaggagctgatctcgctgccgctggacgaaagcaaccccacgccgagcctgaagcccgtgaccctgcagcaggtgctgccccaggcggtgctgctgccgagccgcggggtcaagcgcgagggcgagagcatgtacccgaccatgcagatcatggtgcccaagcgccggcgcgtggaggacgtgctggacaccgtgaaaatggatgtggagcccgaggtcaaggtgcgccccatcaagcaggtggcgccgggcctgggcgtgcaaaccgtggacattcagatccccaccgacatggatgtcgacaaaaaaccctcgaccagcatcgaggtgcaaaccgacccctggctcccagcctccaccgctaccgtctccacttctaccgccgccacggctaccgagcctcccaggaggcgaagatggggcgccgccagccggctgatgcccaactacgtgttgcatccttccatcatcccgacgccgggctaccgcggcacccggtactacgccagccgccggcgcccagccagcaaacgccgccgccgcaccgccacccgccgccgtctggcccccgcccgcgtgcgccgcgtgaccacgcgccggggccgctcgctcgttctgcccaccgtgcgctaccaccccagcatcctttaattcgtgtgctgtgatactgttgcagagagatggctctcacttgccgcctgcgcatccccgtcccgaattaccgaggaagatcccgccgcaggagaggcatggcaggcagcggcctgaaccgccgccggcggcgggccatgcgcaggcgcctgagtggcggctttctgcccgcgctcatccccataatcgccgcggccatcggcacgatcccgggcatagcttccgttgcgctgcaggcgtcgcagcgccgttgatgtgcgaataaagcctctttagactctgacacacctggtcctgtatatttttagaatggaagacatcaattttgcgtccctggctccgcggcacggcacgcggccgttcatgggcacctggaacgagatcggcaccagccagctgaacgggggcgccttcaattggagcagtgtctggagcgggcttaaaaatttcggctcgacgctccggacctatgggaacaaggcctggaatagtagcacggggcagttgttgagggaaaagctcaaagaccagaacttccagcagaaggtggtggacgggctggcctcgggcattaacggggtggtggacatcgcgaaccaggccgtgcagcgcgagataaacagccgcctggacccgcggccgcccacggtggtggagatggaagatgcaactcttccgccgcccaaaggcgaaaagcggccgcggcccgacgcggaggagacgatcctgcaggtggacgagccgccctcgtacgaggaggccgtcaaggccggcatgcccaccacgcgcatcatcgcgccgctggccacgggtgtaatgaaacccgccacccttgacctgcctccaccacccgcgcccgctccaccgaaggcaactccggttgtgcaggcccccccggtggcgaccgccgtgcgccgcgtccccgcccgccgccaggcccagaactggcagagcacgctgcacagtatcgtgggcctgggagtgaaaagtctgaagcgccgccgatgctattgagagagaggaaagaggacactaaagggagagcttaacttgtatgtgccttaccgccagagaacgcgcgaagatggccaccccctcgatgatgccgcagtgggcgtacatgcacatcgccgggcaggacgcctcggagtacctgagcccgggtctggtgcagtttgcccgcgccaccgacacgtacttcagcctgggcaacaagtttaggaaccccacggtggccccgacccacgatgtgaccacggaccggtcccagcgtctgacgctgcgcttcgtgcccgtggatcgcgaggacaccacgtactcgtacaaggcgcgcttcactctggccgtgggcgacaaccgggtgctagacatggccagcacttactttgacatccgcggcgtcctggaccgcggtcccagcttcaaaccctactcgggcacggcctacaacagcctggctcccaagggtgcccccaatcccagtcagtgggaaacaaaagaaaagcaaggaactactggaggagtgcagcaagaaaaagatgtcacaaaaacatttggtgtggctgccaccggcggaattaatataacaaaccagggtctgttactaggaactgacgaaaccgctgagaatggcaaaaaagacatttatgcagacaagactttccagccagaacctcaagttggagaagaaaactggcaggaaaatgaagccttctatggaggaagggctcttaaaaaggacactaaaatgaaaccatgctatggatcttttgctagacctactaatgagaaaggaggtcaggcaaagttcaaaccagttaatgaaggagaacaacctaaagatctggatatagattttgcttactttgacgtccctggcggaagtcctccagcaggtggtagtggggaagaatacaaagcagatataattttgtacactgaaaatgttaatcttgaaacaccagacactcatgtggtttacaagccaggaacttcagataacagttcagaaatcaatctggttcagcagtccatgccaaacagacccaactacattggctttagggacaactttgtaggtctcatgtattacaacagcaccggaaatatgggtgtgctggctggtcaggcttctcagttgaacgctgtggtcgacttgcaagacagaaacaccgagttatcttaccagctattgctagattctctgggtgacagaaccagatactttagcatgtggaactctgcggtggacagttacgatccagatgtcaggatcattgaaaatcacggtgtggaagatgaacttccaaactattgcttcccattgaatggcactggaaccaattccacttatcaaggtgtaaagattacaaatggtaatgatggtgctgaagaaagtgagtgggagaaagacgatgcaatttctagacaaaaccaaatctgcaagggcaatgtctacgccatggagatcaacctgcaggccaacctgtggaagagttttctgtactcgaacgtggccctgtacctgcccgactcctacaagtacacgccggccaacgtcaagctgcccgccaacaccaacacctacgagtacatgaacggccgcgtggtagccccctcgctggtggacgcctacatcaacatcggcgcccgctggtcgttggaccccatggacaacgtcaaccccttcaaccaccaccgcaatgcgggcctgcgctaccgctccatgctgctgggcaacggccgctacgtgcccttccacatccaagtgccccaaaagttctttgccatcaagaacctgctcctgctcccgggctcctacacctacgagtggaacttccgcaaggacgtcaacatgatcctgcagagttccctcggcaacgacctgcgcgtcgacggcgcctccgtccgcttcgacagcgtcaacctatacgccactttcttccccatggcgcacaacaccgcttcaaccttggaagccatgctgcgcaacgacaccaacgaccagtccttcaacgactacctctcggccgccaacatgctctaccccatcccggccaaggccaccaacgtgcccatctccatcccatcgcgcaactgggccgccttccgcggctggagtttcacccggctcaagaccaaggaaactccttccctcggctcgggtttcgacccctactttgtctactcgggctccatcccctacctcgacgggaccttctacctcaaccacaccttcaagaaggtctccatcatgttcgactcctcggtcagctggcccggcaacgaccggctgctcacgccgaacgagttcgagatcaagcgcagcgtcgacggggagggctacaacgtggcccaatgcaacatgaccaaggactggttcctcgtccagatgctctcccactacaacatcggctaccagggcttccacgtgcccgagggctacaaggaccgcatgtactccttcttccgcaacttccagcccatgagcaggcaggtggtcgatgagatcaactacaaggactacaaggccgtcaccctgcccttccagcacaataactcgggcttcaccggctacctcgcacccaccatgcgccaggggcagccctaccccgccaacttcccctacccgctcatcggtcagacagccgtgccctccgtcacccagaaaaagttcctctgcgacagggtcatgtggcgcatccccttctccagcaacttcatgtccatgggcgccctcaccgacctgggtcagaacatgctctacgccaactcggcccacgcgctcgacatgaccttcgaggtggaccccatggatgagcccaccctcctctatcttctcttcgaagttttcgacgtggtcagagtacaccagccgcaccgcggcgtcatcgaggccgtctacctgcgcacgcccttctccgccggcaacgccaccacctaagcatgagcggctccagcgaacgagagctcgcggccatcgtgcgcgacctgggctgcgggccctactttttgggcacccacgacaagcgcttcccgggctttctcgccggcgacaagctggcctgcgccatcgtcaacacggccggccgcgagaccggaggcgtgcactggctcgccttcggctggaacccgcgctcgcgcacctgctacatgttcgacccctttgggttctcggaccgccggctcaagcagatttacagcttcgagtacgaggccatgctgcgccgcagcgccctggcctcctcgcccgaccgctgtctcagcctcgagcagtccactcagaccgtgcaggggcccgactccgccgcctgcggactcttctgttgcatgttcttgcatgccttcgtgcactggcccgaccgacccatggacggaaaccccaccatgaacttgctgacgggggtgcccaacggcatgctacaatcgccacaggtgctgcccaccctcaggcgcaaccaggaggaactctaccgcttcctcgcgcgccactccccttactttcgctcccaccgcgccgccatcgaacacgccaccgcttttgacaaaatgaaacaactgcgtgtatctcaataaacagcacttttattttacatgcactggagtatatgcaagttatttaaaagtcgaaggggttctcgcgctcgtcgttgtgcgccgcgctggggagggccacgttgcggtactggtacttgggctgccacttgaactcggggatcaccagtttgggcactggggtctcggggaaggtctcgctccacatgcgccggctcatctgcagggcgcccagcatgtccggggcggagatcttgaaatcgcagttggggccggtgctctgcgcgcgcgagttgcggtacacggggttgcagcactggaacaccatcagactggggtacttcacactagccagcacgctcttgtcgctgatctgatccttgtccagatcctcggcgttgctcaggccgaacggggtcatcttgcacagctggcgtcccaggaagggcacgctctgaggcttgtggttacactcgcagtgcacgggcatcagcatcatccccgcgccgcgctgcatattcgggtagagggccttgacaaaggccgcgatctgcttgaaagcttgctgggccttggccccctcgctgaaaaacaggccgcagctcttcccgctgaactggttattcccacacccggcatcctgcacgcagcagcgcgcgtcatggctggtcagttgcaccacgctccgtccccagcggttctgggtcaccttagccttgctgggctgctccttcaacgcgcgctgcccgttctcgctggtcacatccatctccaccacgtggtccttgtggatcatcatcgtcccgtgcagacacttgagctggccttccacctcggtgcagccgtgatcccacagggcgcaaccggtgcactcccagttcttgtgcgcaatcccgctgtggctgaagatgtaaccttgcaacatgcggcccatgatggtgctaaatgctttctgggtggtgaaggtcagttgcatcccgcgggcctcctcgttcatccaggtctggcacatcttctggaagatctcggtctgctcgggcatgagcttgtaagcatcgcgcaggccgctgtcgacgcggtagcgttccatcagcacgttcatggtatccatgcccttctcccaggacgagaccagaggcagactcagagggttgcgtacgttcaggacaccgggggtcgcgggctcgacgatgcgttttccgtccttgccttccttcaatagaaccggcggctggctgaatcccactcccacgatcacggcatcttcctggggcatctcttcgtcggggtctaccttggtcacatgcttggtctttctggcttgcttcttttttggagggctgtccacggggagcacgtcctcctcggaagacccggagcccacccgctgatactttcggcgcttggtgggcagaggaggtggcggcgaggggctcctctcctgctccggcggatagcgcgccgacccgtggccccggggcggagtggcctctcggcccatgaaccggcgcacgtcctgactgccgccggccattgtttcctaggggaagatggaggagcagccgcgtaagcaggagcaggaggaggacttaaccacccacgagcaacccaaaatcgagcaggacctgggcttcgaagagccggctcgtctagaacccccacaggatgaacaggagcacgagcaagacgcaggccaggaggagaccgacgctgggctcgagcatggctacctgggaggagaggaggatgtgctgctgaaacacctgcagcgccagtccctcatcctccgggacgccctggccgaccggagcgaaacccccctcagcgtcgaggagctgtgtcgggcctacgagctcaacctcttctcgccgcgcgtaccccccaaacgccagcccaacggcacctgcgagcccaacccgcgtctcaacttctatcccgtctttgcggtccccgaagccctcgccacctatcacatctttttcaagaaccaaaagatccccgtctcctgccgcgccaaccgcaccagcgccgacgcgctcctcgctctggggcccggcgcgcgcatacctgatatcgcttccctggaagaggtgcccaagatcttcgaagggctcggtcgggacgagacgcgcgcggcgaacgctctgaaagaaacagcagaggaagagggtcacactagcgccctggtagagttggaaggcgacaacgccaggctggccgtgctcaagcgcagcgtcgagctcacccacttcgcctaccccgccgtcaacctcccgcccaaggtcatgcgtcgcatcatggatcagctcatcatgccccacatcgaggccctcgatgaaagtcaggagcagcgccccgaggacgcccggcccgtggtcagcgacgagatgctcgcgcgctggctcgggacccacgacccccaggctttggaacagcggcgcaagctcatgctggccgtggtcctggttaccctcgagctggaatgcatgcgccgcttcttcagcgaccccgagaccctgcgcaaggtcgaggagaccctgcactacactttcagacacggtttcgtcaggcaggcctgcaagatctccaacgtggagctgaccaacctggtctcctgcctggggatcctgcacgagaaccgcctggggcagaccgtgctccactctaccctgaagggcgaggcgcggcgggactatgtccgcgactgcgtctttctatttctttgccacacatggcaagcagccatgggcgtgtggcaacagtgtctcgaggacgataacctgaaggagctggacaagcttcttgctagaaatcttaaaaagctgtggacgggcttcgacgagcgcaccgtcgcctcggacctggccgagatcgtgttccccgagcgcctgaggcagacgctgaaaggcgggctgcccgacttcatgagccagagcatgttgcaaaactaccgcactttcattctcgagcgatctgggatgctgcccgccacctgcaacgctttcccctccgactttgtcccgctgagctaccgcgagtgtcccccgccgctgtggagccactgctacctcttgcagctggccaactacatcgcctaccactcggacgtgatcgaggacgtgagcggcgaggggctgctcgagtgccactgccgctgcaacctgtgctccccgcaccgctccctggtctgcaacccccagctactaagcgagacccaggtcatcggtacctttgagctgcaaggtccgcaggagtccaccgctccgctgaaactcacgccggggttgtggacttccgcgtacctgcgcaaatttgtacccgaggactaccacgcccacgagataaagttcttcgaggaccaatcgcgtccgcagcacgcggatctcacggcctgcgtcatcacccagggcgcaatcctcgcccaattgcacgccatccaaaaatcccgccaagagtttcttctgaaaaagggtagaggggtctacctggacccccagacgggcgaagtgctcaacccgggtctcccccagcatgccgaggaagaagcaggagccgctagtggaggagatggaagaagaatgggacagccaggcagaggaggacgaatgggaggaggagacagaggaggaagaattggaagaggtggaagaggagcaggcaacagagcagcccgtcgccgcaccatccgcgccggcagccccgccggtcacggatacaacctccgcagctccggccaagcctcctcgtagatgggatcgagtgaagggtgacggtaagcacgagcggcagggctaccgatcatggagggcccacaaagccgcgatcatcgcctgcttgcaagactgcggggggaacatcgctttcgcccgccgctacctgctcttccaccgcggggtaaacatcccccgcaacgtgttgcattactaccgtcaccttcacagctaagaaaaagcaagtaaaaggagtcgccggaggaggaggaggcctgaggatcgcggcgaacgagcccttgaccaccagggagctgaggaaccggatcttccccactctttatgccatttttcagcagagtcgaggtcagcagcaagagctcaaagtaaaaaaccggtctctgcgctcgctcacccgcagttgcttgtaccacaaaaacgaagatcagctgcagcgcactctcgaagacgccgaggctctgttccacaagtactgcgcgctcactcttaaagactaaggcgcgcccacccggaaaaaaggcgggaattacctcatcgccaccatgagcaaggagattcccaccccttacatgtggagctatcagccccaaatgggcctggccgcgggcgcctcccaggactactccacccgcatgaactggctcagtgccggcccctcgatgatctcacgggtcaacggggtccgcagtcatcgaaaccagatattgttggagcaggcggcggtcacctccacgcccagggcaaagctcaacccgcgtaattggccctccaccctggtgtatcaggaaatccccgggccgactaccgtactacttccgcgtgacgcactggccgaagtccgcatgactaactcaggtgtccagctggccggcggcgcttcccggtgcccgctccgcccacaatcgggtataaaaaccctggtgatccgaggcagaggcacacagctcaacgacgagttggtgagctcttcgatcggtctgcgaccggacggagtgttccaactagccggagccgggagatcctccttcactcccaaccaggcctacctgaccttgcagagcagctcttcggagcctcgctccggaggcatcggaaccctccagtttgtggaggagtttgtgccctcggtctacttcaaccccttctcgggatcgccaggcctctacccggacgagttcataccgaacttcgacgcagtgagagaagcggtggacggctacgactgaatgtcccatggtgactcggctgagctcgctcggttgaggcatctggaccactgccgccgcctgcgctgcttcgcccgggagagctgcggactcatctactttgagtttcccgaggagcaccccaacggccctgcacacggagtgcggatcaccgtagagggcaccaccgagtctcacctggtcaggttcttcacccagcaacccttcctggtcgagcgggaccggggcgccaccacctacaccgtctactgcatctgtccaaccccgaagttgcatgagaatttttgttgtactctttgtggtgagtttaataaaagctaaactcttgcaatactctggaccttgtcgtcgtcaactcaacgagaccgtctacctcaccaaccagactgaggtaaaactcacctgcagaccacacaagacctatatcatctggttcttcgagaacacctcatttgcagtctccaacactcactgcaacgacggtgttgaacttcccaacaacctttccagtggactgagttacgatacacatagagctaagctcgtcctctacaatccttttgtagagggaacctaccagtgccagagcggaccttgtactcacaccttccatttggtgaacgtcaccagcagcagcaacagctcagaaactaaccttccttctgatactaacaaacctcgtttcggaggtgagctaaggcttcccccttctgaggagggggttagcccatacgaagtggtcgggtatttgattttaggggtggtcctgggtgggtgcatagcggtgctagctcagctgccttgctgggtggaaatcaaaatctttatatgctgggtcagatattgtggggaggaaccatgaaggggcttttgctgattatccttttcatggtggggggtgtactgtcatgccacgaacagccacgatgtaacatcaccacaggcaatcatatgagcagagagtgcactgtagtcatcaaatgcgagcacgactgcccactaaacattacattcaagaataacaccatgggaaatgtatgggtgggtttctgggaaccaggagatgagcagaactacacggtcactgtccatggtagcaatggaaatcacactttcggtttcaaattcatttttgaagtcatgtgtgatatcacactgcatgtggctagacttcatggcttgtggccccctaccaaggagaacatggttgggttttctttggcttttgtgatcatggcctgcttgatgtcaggtctgctggtaggggctttagtgtggttcctgaagcgcaagcctaggtacggaaatgaagaaaaggaaaaattgctataatctttttctttttcacagaaccatgaatgctttgaccagtgtcgtgctgctctctcttcttgtagcttttagtaatggggaagctgaaactgtagttgtaaatgttaaatctggtacaaaccacacccttgaaggtcctagaaaaactccagttcagtggtatgggggtgctaactttgacatgttttgcaatggctctaaaatacatcacaatgaattgaatcacacttgctctattcagaacataactcttacattcataaacagaacacatcatggaacatactatggttttggctctgacaatcaaaattcaaaagtgtatcatgtcagagtagatgtagagcctcctagaccccgtgctactttggctcctcctcaggacataactattaagtatggctcaaatagaacattgcagggcccaagtgttactccagttagttggtatgatggtgaaggaaatcggttttgcgatggcgataaaattgatcatacagaaattaatcacacttgcaatgctcaaaaccttactttgctgtttgtgaatgaaacacatgaaagaacatattatggaattagtggtgattggaaacagcgaaatgagtatgatgttactgttacaaagacacaattaaatattaaaaatttgggccaacgcaaaactgatgaaaaccataaaaatggaatgcatcagaaagtcgaacaaaatcctgaaactaagaaagaacagaagccttcaaaaagacctagacaaaaaacattgcaaactacaattcaggttatgattcctattggaactaattatactttagtggggccttcgccaccagtgagctggcatactacaaaaaatggcttaacagaactctgtaatggaaaccctattttaagacacacttgtgatgggcaaaatattacacttattaatgttaatgctacatttgaggctgattactatggctcgaacaataagagtgaatcaaaacactacagagtcaaggttttcaaagaaagaaaagatcaggcactattattcagaccgcttactaccaaaggaagcatgatcattactactgaaaatcaaaactttgaattacaacaaggtgacaatcaagatgatgacaaaattccatcaactactgtggcaatcgtggtgggtgtgattgcgggctttgtgactctgatcattgtcttcatatgctacatctgctgccgcaagcgtcccaggtcatacaatcatatggtagacccactactcagcttctcttactgaaactcagtcactctcatttcagaaccatgaaggctttcacagcttgcgttctgattagcatagtcacacttagtgcagctgaagctaaatgctttcatacttataacttaactagaggggaaaatattacattagcaggtgctggcttaaacacaacatgggaagcatatcacaatggatggaaacaagtttgtccatggaatgacggtcgctatgtgtgcgttggaaacagcagtaccataactaatcttacagttgtagctaatgcaaatttatcatcaactgttaaatttagagctgaaagtttatacattggaacagatggatatgaaagcaatccatcatgcttttatactatcaatgtaattgagcttccaaccaccagatcgccaactaccaccacggtcagtacaactactgagaccacaactcacactacacagttagacactacagtgcagaatagtactgtattggttaggtatttgttaagggaggaaagtactactgaacagacagaggctacctcaagcgccttcagcagcacttcaaatttaacttcgcttgcttggactaatgaaaccggagtatcattgatgcatggccagccttactcaggtttggatattcaaattacttttctggttgtctgtgggatctttattcttgtggttcttctgtactttgtctgctgcaaagccagagaaaaatctaggcggcccatctacaggccagtaatcggggaacctcagccactccaagtggatggaggcttaaggaatcttcttttctcttttacagtatggtgatcagccatgattcctaggttcttcctatttaacatcctcttctgtctcttcaacgtgtgcgctgccttcgcggccgtctcgcacgcctcacccgactgtctcgggcccttccccacctacctcctctttgccctgctcacctgcacctgcgtctgcagcattgtctgcctggtcatcaccttcctgcagctcatcgactggtgctgcgcgcgctacaattacctgcatcatagtcccgaatacagggacgagaacgtagccagaatcttaaggctcatatgaccatgcagactctgctcatactgctatccctcctatcccctaccctcgccacttctgctgattactctaaatgcaaattcgcggacatatggaatttcttagactgctatcaggagaaaattgacatgccctcctattacttggtgattgtgggaatagttatggtctgctcctgcactttctttgccatcatgatctacccctgttttgatctcggctggaactctgttgaagcattcacatacacactagaaagcagttcactagcctccacgccaccacccacaccgcctccccgcagaaatcagtttcccatgattcagtacttagaagagccccctccccgacccccttccactgttagctactttcacataaccggcggcgatgactgaccaccacctggacctcgagatggacggccaggcctccgagcagcgcatcctgcaactgcgcgtccgtcagcagcaggagcgtgccgccaaggagctcctcgatgccatcaacatccaccagtgcaagaagggcatcttctgcctggtcaaacaggcaaagatcacctacgagctcgtgtccggcggcaagcagcatcgcctcgcctatgagctgccccagcagaagcagaagttcacctgcatggtgggcgtcaaccccatagtcatcacccagcagtcgggcgagaccagcggctgcatccactgctcctgcgaaagccccgagtgcatctactccctgctcaagaccctttgcggactccgcgacctcctccccatgaactgatgttgattaaaagcccaaaaaccaatcagccccttcccccatttccccatcccccaattactcataaaaaataaatcattggaattaatcattcaataaagatcacttacttgaaatctgaaagtatgtctctggtgtagttgttcagcagcacctcggtaccctcctcccagctctggtactccagtccccggcgggcggcgaacttcctccacaccttgaaagggatgtcaaattcctggtccacaattttcattgtcttccctctcagatggcaaagaggctccgggtggaagatgacttcaaccccgtctacccctatggctacgcgcggaatcagaatatccccttcctcactcccccctttgtctcctccgatggattcaaaaacttcccccctggggtcctgtcacttaaactggctgatccaatcaccatcaacaatggggatgtctcacttaaggtgggagggggacttgctgtagagcaacagactggtaacctaagcgtaaaccctgatgcacccttgcaagttgcaagtgataagctacagcttgctctggctcctccattcgaggtcagagatggaaagcttgctttaaaggcaggtaatggattaaaagtactagataattccattactggattgactggattattgaatacacttgtggtattaactggaaggggaataggaacggaggaattaaaaaatgacgatggtgtaacaaacaaaggagtcggcttgcgtgtaagacttggagatgacggcgggctgacatttgataaaaagggtgatttagtagcctggaataaaaaagatgacaggcgcaccctgtggacaacccctgacacatctccaaattgcaaaatgagtacagaaaaggattctaaacttacgttgacacttacaaagtgtggaagtcaggttctgggaaatgtatctttacttgcagttacaggtgaatatcatcaaatgactgctactacaaagaaggatgtaaaaatatctttactatttgatgagaatggaattctattaccatcttcgtcccttagcaaagattattggaattacagaagtgatgattctattgtatctcaaaaatataataatgcagttccattcatgccaaacctgacagcttatccaaaaccaagcgctcaaaatgcaaaaaactattcaagaactaaaatcataagtaatgtctacttaggtgctcttacctaccaacctgtaattatcactattgcatttaatcaggaaactgaaaatggatgtgcttattctataacatttaccttcacttggcaaaaagactattctgcccaacagtttgatgttacatcttttaccttctcatatcttacccaagagaacaaagacaaagactaataaaatgttttgaactgaatttatgaatctttatttatttttacaccagcacgggtagtcagtttcccaccaccagcccatttcacagtgtaaacaattctctcagcacgggtggccttaaatagggaaatgttctgattagtgcgggaactggacttggggtctataatccacacagtttcctggcgagccaaacgggggtcggtgattgagatgaagccgtcctctgaaaagtcatccaagcgggcctcacagtccaaggtcacagtctggtggaatgagaagaacgcacagattcatactcggaaaacaggatgggtctgtgcctctccatcagcgccctcaacagtctttgccgccggggctcggtgcggctgctgcagatgggatcgggatcgcaagtctctctgactatgatccccacagccttcagcaacagtctcctggtgcgtcgggcacagcaccgcatcctgatctctgccatgttctcacagtaagtgcagcacataatcaccatgttattcagcagcccataattcagggcgctccaaccaaagctcatgttggggatgatggaacccacgtgaccatcgtaccagatgcggcagtatatcaggtgcctgcccctcatgaacacactgcccatatacatgatctctttgggcatgtttctgttcacaatctgccggtaccatgggaatcgctggttgaacatgcacccgtaaatgactctcctgaaccacacggccagcatggtgcctcccgcccgacactgcagggatcccggggctgaacagtggcaatgcaggatccagcgctcgtacccgctcaccatctgagctctcaccaagtccagggtagcggggcacaggcacactgacatacatctttttaaaatttttatttcctctggggtcaggatcatatcccaggggactggaaactcttggagcagggtaaagccagcagcacatggtaatccacggacagaacttacattatgataatctgcatgatcacaatcgggcaacagggggtgttgttcagttagtgaggccctagtctcctcctcacatcgtggtaaacgggccctgcggtaaggatgatggcggagcgagctcgactgttcctcggtggacattgaaatggattctcttgcgtaccttgtcgtacttctgccagcagaaagtggctcgggaacagcagatacctttcctcctgctgtccttccgctgctgacgctcagtcatccaactgaagtacagccattcccgcaggttctccagcagctcctgtgcatctgatgaaacaaaagtcccgtcgatgcggattccccttaaaacatcagccaggacattgtaggccatcccaatccagttaatgcatcctgatctatcatgaagaggaggtgggggaagaactggaagaaccatttttattccaagcggtctcgaaggacgataaagtgcaagtcacgcaggtgacagcgttccccgccgctgtgctggtggaaacagacagccaggtcaaaacccactctattttcaaggtgctcgactgtggcttcgagcagtggctctacgcgtacatccagcataagaatcacattaaaggctggacctccatcgatttcatcaatcatcaggttacactcattcaccatccccaggtaattctcatttttccagccttggattatttctacaaattgttggtgtaagtccactccgcacatgtggaaaagttcccacagcgccccctccactttcataatcaggcagaccttcatattagaaacagatcctgctgctccaccacctgcagcgtgttcaaaacaacaagattcaatgaggttctgccctctgccctcagctcacgtctcagcgtcagctgcaaaaagtcactcaagtcctcagccactacagctgacaattcagagccagggctaagcgtgggactggcaagcgtgagtgagtactttaatgctccaaagctagcacccaaaaactgcatgctggaataagctctctttgtgtcaccggtgatgccttccaataggtgagtgataaagcgaggtagtttttctttaatcatttgagtaatagaaaagtcctctaaataagtcactaggaccccaggaaccacaatgtggtagctgacagcgtgtcgctcaagcatggttagtagagatgagagtctgaaaaacagaaagcatgcactaaaccagagttgccagtctcactgaaggaaaaatcactctctccagcagcaaagtgcccactgggtggccctctcggacatacaaaaatcgatccgtgtggttaaagagcagcacagttagctcctgtcttctcccagcaaagatcacatcggactgggttagtatgcccctggaatggtagtcattcaaggccataaatctgccttggtagccattaggaatcagcacgctcactctcaagtgaaccaaaaccaccccatgcggaggaatgtggaaagattctgggcaaaaaaaggtatatctattgctagtcccttcctggacgggagcaatccctccagggctatctatgaaagcatacagagattcagccatagctcagcccgcttaccagtagacagagagcacagcagtacaagcgccaacagcagcgactgactacccactgacccagctccctatttaaaggcaccttacactgacgtaatgaccaaaggtctaaaaaccccgccaaaaaaacacacacgccctgggtgtttttcgcgaaaacacttccgcgttctcacttcctcgtatcgatttcgtgactcaacttccgggttcccacgttacgtcacttctgcccttacatgtaactcagccgtagggcgccatcttgcccacgtccaaaatggcttccatgtccggccacgcctccgcggcgaccgttagccgtgcgtcgtgacgtcatttgcatcaacgtttctcggccaatcagcagtagccccgccctaaatttaaaacctcatttgcatattaacttttgtttactttgtggggtatattattgatgatg

SEQ ID NO: 27 - DNA, 35145 bp, Adenovirus D27
  MISC_FEATURE (1)..(35145): Complete Genome
catcatcaataatataccccacaaagtaaacaaaagttaatatgcaaatgagcttttgaattttaacggtttcggggcggagccaacgctgattggacgagagaagacgatgcaaatgacgtcacgacgcacggcgttaacggtcgccgcggaggcgtggcctagcccggaagcaagtcgcggggctgatgacgtataaaaaagcggactttagacccggaaacggccgattttcccgcggccacgcccggatatgaggtaattctgggcggatgcaagtgaaattaggtcattttggcgcgaaaactgaatgaggaagtgaaaagcgaaaaataccggtccctcccagggcggaatatttaccgagggccgagagactttgaccgattacgtgggggtttcgattgcggtgtttttttcgcgaatttccgcgtccgtgtcaaagtccggtgtttatgtcacagatcagctgatccgcagggtatttaaaccagtcgagtccgtcaagaggccactcttgagtgccagcgagtagagatttctctgagctccgctcccagagaccgagaaaaatgagacacctgcgcctcctgccttcaactgtgcccggtgagctggctgtgcttatgctggaggactttgtggatacagtattggaggacgaactgcatccaagtccgttcgagctgggacccacacttcaggatctctatgatctggaggtagatgcccatgatgacgaccctaacgaggaggctgtgaatttaatatttccagaatctatgattcttcaggctgacatagccaacgaatctactccacttcatacaccgactctgtcacccatacctgaattggaagaggaggacgaactagacctccggtgttatgaggaaggttttcctcccagcgattcagaggatgaacggggtgagcagaccatggctctgatctcagactatgcttgtgtgattgtggaggaacaagtagtgattgaaaattctaccgagccagtggagggctgtagaaaatgccagtaccaccgggataagtctggagacccgaacgcatcatgcgctttgtgctatatgaaacagactttcagctttatttacagtaagtggagtgaatgtgagagaggctgagtgcttaacacatcactgtgtattgcttgaacagctgtgctaagtgtggtttatttttgtttctaggtccggtgtcagaggatgagtcatcaccctcagaagaagaccacccgtctccccctgatctcacagatgacacgcccctgcaagtgcacagacccaccccagtcagagccagtggcgagaggcgagcagctgttgaaaaaattgaggacttgttacatgacatgggtggggatgaacctttggacctgagcttgaaacgccccaggaactaggcgcagctgcgcttagtcatgtgtaaataaagttgtacaataaaagtatatgtgacgcatgcaaggtgtggtttatgactcatgggcggggcttagtcctatataagtggcaacacctgggcactgggcacagaccttcagggagttcctgatggatgtgtggactatccttgcagactttagcaagacacgccggcttgtagaggatagttcagacgggtgctccgggttctggagacactggtttggaactcctctatctcgcctggtgtacacagttaagaaggattataaagaggaatttgaaaatatttttgctgactgctctggcctgctagattctctgaatcttggccaccagtcccttttccaggaaagggtactccacagccttgatttttccagcccagggcgcactacagccggggttgcttttgtggtttttctggttgacaaatggagccaggacacccaactgagcaggggctacatcctggacttcgcagccatgcacctgtggagggcctggatcaggcagcggggacagagaatcttgaattactggcttctacagccagcagctccgggtcttcttcgtctacacagacaaacatccatgttggaggaagaaatgaggcaggccatggacgagaacccgaggagcggcctggaccctccgtcggaagaggagctggattgaatcaggtatccagcctgtacccagagcttagcaaggtgctgacatccatggccaggggagttaagagggagaggagcgatgggggtaataccgggatgatgaccgagctgacggccagcctgatgaatcggaagcgcccagagcgccttacctggtacgagctacagcaggagtgcagggatgagttgggcctgatgcaggataaatatggcctggagcagataaaaacccattggttgaacccagatgaggattgggaggaggctattaagaagtatgccaagatagccctgcgcccagattgcaagtacatagtgaccaagaccgtgaatatcagacatgcctgctacatctcggggaacggggcagaggtggtcatcgataccctggacaaggccgccttcaggtgttgcatgatgggaatgagagcaggagtgatgaatatgaattccatgatcttcatgaacatgaagttcaatggagagaagtttaatggggtgctgttcatggccaacagccacatgaccctgcatggctgcagtttcttcggcttcaacaatatgtgcgcagaggtctggggcgcttccaagatcaggggatgtaagttttatggctgctggatgggcgtggtcggaagacccaagagcgagatgtctgtgaagcagtgtgtgtttgagaaatgctacctgggagtctctaccgagggcaatgctagagtgagacactgctcttccctggagacgggctgcttctgcctggtgaagggcacagcctctctgaagcataatatggtgaagggctgcacggatgagcgcatgtacaacatgctgacctgcgattcgggggtctgccatatcctgaagaacatccatgtgacctcccaccccagaaagaagtggccagtgtttgagaataacctgctgatcaagtgccatatgcacctgggagccagaaggggcaccttccagccgtaccagtgcaactttagccagaccaagctgctgttggagaacgatgccttctccagggtgaacctgaacggcatctttgacatggatgtctcggtgtacaagatcctgagatacgatgagaccaagtccagggtgcgcgcttgcgagtgcgggggcagacacaccaggatgcagccagtggccctggatgtgaccgaggagctgagaccagaccacctggtgatggcctgtaccgggaccgagttcagctccagtggggaggacacagattagaggtaggtcgagtgagtagtgggcgtggctaaggtgactataaaggcgggtgtcttacgagggtctttttgcttttctgcagacatcatgaacgggaccggcggggccttcgaaggggggctttttagcccttatttgacaacccgcctgccgggatgggccggagttcgtcagaatgtgatgggatcgacggtggatgggcgcccagtgcttccagcaaattcctcgaccatgacctacgcgaccgtggggagctcgtcgctcgacagcaccgccgcagccgcggcagccgcagctgccatgacagcgacgagactggcctcgagctacatgcccagcagcggcagcagcccctctgtgcccagttccatcatcgccgaggagaaactgctggccctgctggccgagctggaagccctgagccgccagctggccgccctgacccagcaggtgtccgagctccgcgagcagcaacagcagcaaaataaatgattcaataaacacagattctgatccaaacagcaaagcatctttattatttattttttcgcgcgcggtaggccctggtccacctctcccgatcattgagagtgcggtggattttttccaggacccggtagaggtgggattggatgttgaggtacatgggcatgagcccgtcccgggggtggaggtagcaccactgcatggcctcgtgctctggggtcgtgttgtagatgatccagtcatagcaggggcgctgggcgtggtgctggatgatgtctttgagaaggagactgatggccacggggagccccttggtgtaggtattggcgaagcggttgagctgggagggatgcatgcggggggagatgatgtgcagtttggcctggatcttgaggttggcgatgttgccacccagatcccgccgggggttcatgttgtgcaggaccaccaggacggtgtagcccgtgcacttggggaacttgtcatgcaacttggaagggaatgcgtggaagaatttggagacgcccttgtgcccgcccaggttttccatgcattcatccatgatgatggcgatgggcccgtgggctgcggctttggcaaagacgtttctggggtcagatacatcataattatgctcctgggtgagatcatcataagacattttaatgaatttggggcggagggtgccagattgggggacgatggttccctcgggccccggggcgaagttcccctcacagatctgcatctcccaggctttcatctcggagggggggatcatgtccacctgcggggcgatgaaaaaaacggtttccggggctggggtgatgagctgcgaagagagcaggtttctcaacagctgggacttgccgcacccggtcgggccgtagatgaccccgatgacgggttgcaggtggtagttcaaggacatgcagctgccgtcgtcccggaggaggggggccacctcgttgagcatgtctctgacttggaggttttcccgaacgagctcgccgaggaggcggtccccgcccagcgagaggagctcttgcagggaagcaaagtttttcaggggcttgagtccgtcggccatgggcatcttggcgagggtctgcgagaggagctccaggcggtcccagagctcggtgacgtgctctacggcatctcgatccagcagacttcctcgtttcgggggttgggacgactgcgactgtagggcacgagacgatgggcgtccagcgcggccagcgtcatgtccttccagggtctcagggtccgagtgagggtggtctccgtcacggtgaaggggtgggcccctggctgggcgcttgcaagggtgcgcttgagactcatcctgctggtgctgaaacgggcacggtcttcgccctgcgagtcggcgagatagcagttgaccatgagctcgtagttgagggcctcggcggcgtggcccttggcgcggagcttgcccttggaagagcgcccgcaggcgggacagaggagggattgcagggcgtagagcttgggggcgagaaagacggactcgggagcgaaagcgtccgctccgcagtgggcgcagacggtctcgcactcgacgagccaggtgagctctggctgctcggggtcaaaaaccagttttcccccgttctttttgatgcgcttcttacctcgcgtctccatgagtctgtgtccgcgctcggtgacaaacaggctgtcggtgtccccgtagacggacttgattggcctgtcctgcaggggcgtcccgcggtcctcctcgtagagaaactcggaccactctgagacaaaggcgcgcgtccacgccaagacaaaggaggccacgtgcgaggggtagcggtcgttgtccaccagggggtccaccttttccaccgtgtgcagacacatgtccccctcctccgcatccaagaaggtgattggcttgtaggtgtaggccacgtgaccgggggtccccgacgggggggtataaaagggggcgggtctgtgctcgtcctcactctcttccgcgtcgctgtccacgagcgccagctgttggggtaggtattccctctcgagagcgggcatgacctcggcactcaggttgtcagtttctagaaacgaggaggatttgatgttggcctgccctgccgcgatgctttttaggagactttcatccatctggtcagaaaagacaatttttttattgtcaagcttggtggcgaaggagccatagagggcgttggagagaagcttggcgatggatctcattgtctgatttttgtcacggtcggcgcgctccttggccgcgatgttgagctggacatactcgcgcgcgacgcacttccattccgggaagacggtggtgcgctcgtcgggcacgatcctgacgcgccagccgcggttatgcagggtgaccaggtccacgctggtggccacctcgccgcgcaggggctcgttggtccagcagagtctgccgcccttgcgcgagcagaacggtggcagcacatcaagcagatgctcgtcaggggggtccgcatcgatggtgaagatgcccggacagagttccttgtcaaaataatctatttttgaggatgcatcatccaaggccatctgccactcgcgggcggccagcgctcgctcgtaggggttaaggggcggaccccagggcatgggatgcgtgagggcggaggcgtacatgccgcagatgtcatagacatagatgggctccgagaggatgccgatgtaggtgggataacagcgccccccgcggatgctggcgcgcacgtagtcatacaactcatgcgagggggccaagaaggcggggccgagattggtgcgctggggctgctcggcgcggaagacgatctggcgaaagatggcatgcgagttggaggagatggtgggccgttggaagatgttaaagtgggcgtggggcaggcggaccgagtcgcggatgaagtgcgcgtaggagtcttgcagcttggcgacgagctcggcggtgacgaggacgtccatggcgcagtagtccagcgtttcgcggatgatgtcataactcgcctctcctttcttctcccacagctcgcggttgagggcgtattcctcgtcatccttccagtactcccggagcgggaatcctcgatcgtccgcacggtaagagcccagcatgtagaaatggttcacggccttgtagggacagcagcccttctccacggggagggcgtaagcttgagcggccttgcggagcgaggtgtgcgtcagggcaaaggtgtccctgaccatgactttcaagaactggtacttgaaatccgagtcgtcgcagccgccgtgctcccagagctcgaaatcggtgcgcttctttgagagggggttaggcagagcgaaagtgacgtcattgaagagaatcttgcctgcccgcggcatgaaattgcgggtgatgcggaaagggcccgggacggaggctcggttgttgatcacctgggcggcaaggacgatctcgtcgaagccgttgatgttgtgcccgacgatgtagagttccatgaatcgcgggcggcctttgatgtgcggcagctttttgagctcctcgtaggtgaggtcctcggggcattgcaggccgtgctgctcgagcgcccactcctggagatgtgggttggcttgcatgaaggaagcccagagctcgcgggccatgagggtctggagctcgtcgcgaaagaggcggaactgctggcccacggccatcttttctggggtgacgcagtagaaggtgagggggtcccgctcccagcgatcccagcgtaagcgcacggcgagatcgcgagcgagggcgaccagctcgggttcccccgagaatttcatgaccagcatgaaggggacgagctgcttgccgaaggaccccatccaggtgtaggtttctacatcgtaggtgacaaagagccgctccgtgcgaggatgagagccgattgggaagaactggatttcctgccaccagttggacgagtggctgttgatgtgatgaaagtagaaatcccgccggcgaaccgagcactcgtgctgatgcttgtaaaagcgtccgcagtactcgcagcgctgcacgggctgtacctcatccacgagatacacagcgcgtcccttgaggaggaacttcaggagtggcggccctggctggtggctttcatgttcgcctgcgtgggactcaccctggggctcctcgaggacggagaggctgacgagcccgcgcgggagccaggtccagatatcggcgcggcgggggcggagagcgaagacgagggcgcgcagttgggagctgtccatggtgtcgcggagatccaggtccgggggcagggttctgaggttgacctcgtagaggcgggtgagggcgtgcttgagatgcagatggtacttgatctctacgggtgagttggtggtcgtgtccacgcattgcatgagcccgtagctgcgcggggccacgaccgtgccgcggtgcgcttttagaagcggtgtcgcggacgcgctcccggcggcagcggcggttccggccccgcgggcaggggcggcagaggcacgtcggcgtggcgctcgggcaggtcccggtgctgcgccctgagagcgctggcgtgcgcgacgacgcggcggttgacatcctggatctgccgcctctgcgtgaagaccacgggccccgtgactttgaacctgaaagacagttcaacagaatcaatctctgcgtcattgacggcggcctgacgcaggatctcttgcacgtcgcccgagttgtcctggtaggcgatctcggacatgaactgttcgatctcctcctcctggagatcgccgcggcccgcgcgctccacggtggcggcgaggtcattggagatgcggcccatgagctgcgagaaggcgcccaggccgctctcgttccagacgcggctgtagaccacgtccccgtcggcgtcgcgtgcgcgcatgaccacctgcgcgaggttgagctccacgtgccgcgtgaagacggcgtagttgcgcaggcgctggaagaggtagttgagggtggtggcgatgtgctcggtgacgaagaagtacatgatccagcggcgcaggggcatctcgctgatgtcgccgatggcctccagcctttccatggcctcgtagaaatccacggcgaagttgaaaaactgggcattgcgggccgagaccgtgagctcgtcttccaggagcctgatgagctcggcgatggtggcgcgcacctcgcgctcgaaatccccgggggcctcctcttcttcctcttcttccatgacgacctcttcttctatttcttcctctgggggcggtggtggtggcggggcccgacgacgacggcgacgcaccgggagacggtcgacgaagcgctcgatcatctccccgcggcggcgacgcatggtttcggtgacggcgcgaccccgttcgcgaggacgcagcgtgaagacgccgccggtcatctcccggtaatggggcgggtccccattgggcagcgatagggcgctgacgatgcatcttatcaattgcggtgtaggggacgtgagcgcgtcgagatcgaccggatcggagaatctttcgaggaaagcgtctagccaatcgcagtcgcaaggtaagctcaaacacgtagcagccctgtggacgctgttagaattgcggttgctgatgatgtaattgaagtaggcgtttttgaggcggcggatggtggcgaggaggaccaggtccttgggtcccgcttgctggatgcggagccgctcggccatgccccaggcctggccctgacaccggctcaggttcttgtagtagtcatgcatgagcctctcaatgtcatcactggcggaggcggagtcttccatgcgggtgaccccgacgcccctgagcggctgcacgagcgccaggtcggcgacgacgcgctcggcgaggatggcctgttgcacgcgggtgagggtgtcctggaagtcatccatgtcgacgaagcggtggtaggccccggtgttgatggtgtaggtgcagttggccatgagcgaccagttgacggtctgcaggccgggttgcacgacctcggagtacctgatccgcgagaaggcgcgcgagtcgaagacgtagtcgttgcaggtgcgcacgaggtactggtagccgactaggaagtgcggtggcggctggcggtagagcggccagcgctgggtggccggcgcgcccggggccaggtcctcgagcatgaggcggtggtagccgtagaggtagcgggacatccaggtgatgccggcggcggtggtggaggcgcgcgggaactcgcggacgcggttccagatgttgcgcagcggcaggaaatagtccatggtcggcacggtctggccggtgagacgcgcgcagtcattgacgctctagaggcaaaaacgaaagcggttgagcgggctcttcctccgtagcctggcggaacgcaaacgggttaggccgcgtgtgtaccccggttcgagtcccctcgaatcaggctggagccgcgactaacgtggtattggcactcccgtctcgacccgagcccgatagccgccaggatacggcggagagccctttttgctggccgaggggggtcgctagacttgaaagcgaccgaaaaccctgccgggtagtggctcgcgcccgtagtctggagaagcatcgccagggttgagtcgcggcagaacccggttcgaggacggccgcggcgagcgggacttggtcaccccgccgatttaaagacccacagccagccgacttctccagttacgggagcgagcccccttttttctttttgccagatgcatcccgtcctgcgccaaatgcgtcccacccccccggcgaccaccgcgaccgcggccgtagcaggcgccggcgctagccagccacagacagagatggacttggaagagggcgaagggctggcaagactgggggcgccgtccccggagcgacacccccgcgtgcagctgcagaaggacgtgcgcccggcgtacgtgcctgcgcagaacctgttcagggaccgcagcggggaggagcccgaggagatgcgcgactgccggtttcgggcgggcagggagctgcgcgagggcctggaccgccagcgcgtgctgcgcgacgaggatttcgagccgaacgagcagacggggatcagccccgcgcgcgcgcacgtggcggcggccaacctggtgacggcctacgaacagacggtgaagcaggagcgcaacttccaaaagagtttcaacaaccacgtgcgcacgctgatcgcgcgcgaggaggtggccctgggcctgatgcacctgtgggacctggcggaggccatcgtgcagaacccggacagcaagcctctgacggcgcagctgttcctggtggtgcagcacagcagggacaacgaggcgttcagggaggcactgctgaacatcgccgagcccgagggtcgctggctgctggagctgatcaacatcttgcagagcatcgtagtgcaggagcgcagcctgagcctggccgagaaggtggcggcgatcaactactcggtgctgagcctgggcaagttttacgcgcgcaagatttacaagacgccgtacgtgcccatagacaaggaggtgaagatagacagcttttacatgcgcatggcgctcaaggtgctgacgctgagcgacgacctgggcgtgtaccgcaacgaccgcatccacaaggccgtgagcacgagccggcggcgcgagctaagcgaccgcgagctgatgctgagccttcgccgggcgctggtagggggcgccgccggcggcgaggagtcctacttcgacatgggggcggacctgcattggcagccgagccggcgcgccttggaggccgcctacggtccagaggacttggatgaggatgaggaagaggaggaggatgcacccgctgcggggtactgacgcctccgtgatgtgtttttagatgtcccagcaagccccggaccccgccataagggcggcgctgcaaagccagccgtccggtctagcatcggacgactgggaggccgcgatgcaacgcatcatggccctgacgacccgcaaccccgagtcctttagacaacagccgcaggccaacagactctcggccattctggaggcggtggtcccctctcgaaccaaccccacgcacgagaaggtgctggcgatcgtgaacgcgctggcggagaacaaggccatccgtcccgacgaggccgggctggtgtacaacgccctgctggagcgcgtgggccgctacaacagcacgaacgtgcagtccaacctggaccggctggtgacggacgtgcgcgaggccgtggcgcagcgcgagcggttcaagaacgagggcctgggctcgctggtggcgctgaacgccttcctggcgacgcagccggcgaacgtgccgcgcgggcaggacgattacaccaactttatcagcgcgctgcggctgatggtgaccgaggtgccccagagcgaggtgtaccagtcgggcccggactactttttccagacgagccggcagggcttgcagacggtgaacctgagccaggctttcaagaacctgcgcgggctgtggggcgtgcaggcgcccgtgggcgaccggtcgacggtgagcagcttgctgacgcccaactcgcggctgctgctgctgctgatcgcgcccttcaccgacagcggcagcgtgaaccgcaactcgtacctgggccacctgctgacgctgtaccgcgaggccataggccaggcgcaggtggacgagcagaccttccaggagatcacgagcgtgagccgcgcgctggggcagaacgacaccgacagtctgagggccaccctgaacttcttgctgaccaatagacagcagaagatcccggcgcagtacgcactgtcggccgaggaggaaaggatcctgagatatgtgcagcagagcgtagggctgttcctgatgcaggagggcgccacccccagcgccgcgctggacatgaccgcgcgcaacatggaacctagcatgtatgccgccaaccggccgttcatcaataagctgatggactacctgcaccgcgcggcggccatgaacacggactactttaccaacgccatcctgaacccgcactggctcccgccgccggggttctacacgggcgagtacgacatgcccgaccccaacgacgggttcctgtgggacgacgtggacagcgcggtgttctcgccgacttttcaaaagcgccaggaggcgccgccgagcgagggcgcggtggggaggagcccctttcctagcttagggagtttgcatagcttgccgggctcggtgaacagcggcagggtgagccggccgcgcttgctgggcgaggacgagtacctgaacgactcgctgctgcagccgccacgggccaagaacgccatggccaataacgggatagagagtctggtggacaaactgaaccgatggaagacctacgctcaggaccatagggacgcgcctgcgccgcggcgacagcgccacgaccggcaacggggcctggtgtgggacgacgaggactcggccgacgataacagcgtgttggacttgggcgggagcggtggggccaacccgttcgcgcatctgcagcccagactggggaggcggatgttttgaatgaaataaaactcaccaaggccatagcgtgcgttctcttccttgttagagatgaggcgcgcggtggtgtcttcctctcctcctccctcgtacgagagcgtgatggcgcaggcgaccctggaggttccgtttgtgcctccgcggtatatggctcctacggagggcagaaacagcattcgttactcggagctggctccgcagtacgacaccactcgcgtgtacttggtggacaacaagtcggcggacatcgcttccctgaactaccaaaacgaccacagcaacttcctgaccacggtggtgcagaacaacgatttcaccccagccgaggccagcacgcagacgataaattttgacgagcggtcgcggtggggcggtgatctgaagaccattctgcacaccaacatgcccaatgtgaacgagtacatgttcaccagcaagtttaaggcgcgggtgatggtggctaggaaggtggtagatcagaatgataggagcaaggatgagttaaaatatgagtggtttgagtttaccctgcccgagggcaacttttccgagaccatgaccatagacctgatgaacaacgccatcttggaaaactacttacaagtggggcgacagaatggcgtgctggagagcgatatcggagtcaagtttgacagtaggaatttcaagctgggctgggacccggtgaccaagctggtgatgccaggggtctacacctacgaggcctttcacccggacgtggtgctgctgcctggctgcggggtggacttcaccgagagccgcctgagcaaccttctgggcattcgcaagaagcaacctttccaagagggcttcaggatcatgtatgaggatctcgagggtggtaacatccccgccctcctggatgtcaagcaatatttggatagtaaaaagaagcttgaggaggcaacacaaaatgcaaccagggctgctggagatatcagaggagacagtcatattccaagagctgtggaacaagcggctgaaaaggatctggtcattgtaccagtaacacaagatgaaagcaaaagaagctataatgtcatagatggcacccatgacaccctgtaccgaagttggtacctgtcctatacctacggggaccccgagaagggggtgcagtcgtggacgctgctcaccaccccggacgttacctgcggcgcggagcaagtctactggtcgctgccggacctcatgcaagaccccgtcaccttccgctctacccagcaagtcagcaactaccccgtggtcggcgccgagctcatgcccttccgcgccaagagcttttacaacgacctcgccgtctactcccagctcatccgcagctacacctccctcacccacgtcttcaaccgcttccctgacaaccagatcctctgccgcccgcccgcgcccaccatcaccaccgtcagtgaaaacgtgcctgctctcacagatcacgggacgctaccgctgcgcagcagtatccgcggagtccagcgagtgaccgtcactgacgcccgtcgccgcacctgtccctacgtctacaaggccctgggcatagtcgcgccgcgcgtgctttccagtcgcaccttctaaaaaaatgtctattctcatctcgcccagcaataacaccggctggggtcttactaggcccagcaccatgtacggaggagccaagaagcgctcccagcagcaccccgtccgcgtccgcggccacttccgcgctccctggggcgcttacaagcgcgggcggacttccaccgccgtgcgcaccaccgtcgacgacgtcatcgactcggtggtcgccgacgcgcgcaactacactcccgccccctccaccgtggacgcggtcatcgacagcgtggtggccgacgcgcgcgactatgccagacgcaagagccggcggcgacggatcgccaggcgccaccggagtacgcccgccatgcgcgccgcccgggctctgctgcgccgcgccagacgcacgggccgccgggccatgatgcgagccgcgcgccgcgctgccactgcacccacccccgcaggcaggactcgcagacgagcggccgccgccgccgctgcggccatctctagcatgaccagacccaggcgcggaaacgtgtactgggtgcgcgactccgtcacgggcgtgcgcgtgcccgtgcgcacccgtcctcctcgtccctgatctaatgcttgtgtcctcccccgcaagcgacgatgtcaaagcgcaaaatcaaggaggagatgctccaggtcgtcgccccggagatttacggaccaccccaggcggaccagaaaccccgcaaaatcaagcgggttaaaaaaaaggatgaggtggacgagggggcagtagagtttgtgcgcgagttcgctccgcggcggcgcgtaaattggaaggggcgcagggtgcagcgcgtgttgcggcccggcacggcggtggtgttcacgcccggcgagcggtcctcggtcaggagcaagcgtagctatgacgaggtgtacggcgacgacgacatcctggaccaggcggcggagcgggcgggcgagttcgcctacgggaagcggtcgcgcgaagaggagctgatctcgctgccgctggacgagagcaaccccacgccgagcctgaagcccgtgaccctgcagcaggtgctgccccaggcggtgctgctgccgagccgcggggtcaagcgcgagggcgagagcatgtacccgaccatgcagatcatggtgcccaagcgccggcgcgtggaggacgtgctggacaccgtgaaaatggatgtggagcccgaggtcaaggtgcgccccatcaagcaggtggcgccgggcctgggcgtgcaaaccgtggacattcagatccccaccgacatggatgtcgacaaaaaaccctcgaccagcatagaggtgcagaccgacccctggctcccagcctccaccgctaccgtctccacttctaccgccgccacggctaccgagcctcccaggaggcgaagatggggcgccgccagccggctgatgcccaactacgtgttgcatccttccattatcccaacgcctggctaccgcggcacccggtactacgccagccgcaggcacccagccaccaagcgccgccgccgcaccaccacccgccgccgtctggccccagcccgcgtgcgccgcgtgaccacgcgccggggccgctcgctcgttctgcccaccgtgcgctaccaccccagcatcctttaattcgtgtgctgtgatactgttgcagagagatggctctcacttgccgcctgcgcatccccgtcccgaattaccgaggaagatcccgccgcaggagaggcatggcaggcagcggcctgaaccgccgccggcggcgggccatgcgcaggcgcctgagtggcggctttctgcccgcgctcatccccataatcgccgcggccatcggcacgatcccgggcatagcttccgttgcgctgcaggcgtcgcagcgccgttgatgtgcgaataaagcctctttagactctgacacacctggtcctgtatatttttagaatggaagacatcaattttgcgtccctggctccgcggcacggcacgcggccgttcatgggcacctggaacgagatcggcaccagccagctgaacgggggcgccttcaattggagcagtgtctggagcgggcttaaaaatttcggctcgacgctccggacctatgggaacaaggcctggaatagtagcacggggcagttgttgagggaaaagctcaaagaccagaacttccagcagaaggtggtggacgggctggcctctggcattaacggggtggtggacatcgcgaaccaggccgtgcagcgcgagataaacagccgcctggacccgcgcccgcccacggtggtggagatggaagatgcaactcttccgccgcccaaaggcgagaagcggccgcggcccgacgcggaggagacgatcctgcaggtggacgagccgccctcgtacgaggaggccgtgaaggccggcatgcccaccacgcgcatcatcgcgccgctggccacgggtgtaatgaaacccgccacccttgacctgcctccaccacccacgcccgctccaccaaaggcagctccggttgtgcagccccctcctgtggcgaccgccgtgcgccgcgtccccgcccgccgccaggcccagaactggcagagcacgctgcacagtatcgtgggcctgggagtgaaaagtctgaagcgccgccgatgctattgagagagaggaaagaggacactaaagggagagcttaacttgtatgtgccttaccgccagagaacgcgcgaagatggccaccccctcgatgatgccgcagtgggcgtacatgcacatcgccgggcaggacgcctcggagtacctgagcccgggtctggtgcagtttgcccgcgccaccgacacgtacttcagcctgggcaacaagtttaggaaccccacggtggctcccacccacgatgtgaccacggaccggtcccagcgtctgacgctgcgctttgtgcccgtggatcgcgaggacaccacgtactcatacaaggcgcgcttcactctggccgtgggcgacaaccgggtgctagacatggccagcacgtactttgatatccgcggcgtcctggaccgcggtcccagcttcaaaccctactcgggcacggcttacaacagcctggctcccaagggcgcccccaactccagtcagtggactgctaaagaaaatcaaaaagatgttacaaaaacatttggtgtagctccaatgggaggaattaatatatcaaaggatggtttacaaattggcgttgaagaaacagttgacaagcaagaaaaggaaatttatgctgacaagagtttccagccagaacctcaagtaggagaagaaaactggcaagagtcagaagccttctatggcggcagagctcttaagaaggacaccaagatgaaaccatgctatggttcatttgccagacccactaatgaaaagggaggtcaggcaaaattcaaagcacctgctgtcgaaggagaacagcctaaggaacttgatattgactttgctttctttgacactgactcaggtgacacagaatataaagcagatattgttatgtatgctgaaaacgtgaatctggaaactccagacactcatgttgtttacaaaccaggcaaagaggatgatagctctgaagcaaacttggttcagcagtccatgccaaacagaccaaactacattggctttagagacaattttgtggggctcatgtattacaacagcactggtaacatgggtgtgctggctggtcaggcctctcagttgaatgctgtggtcgacttgcaagacagaaacacagagctgtcttaccagctattgctagattctctgggtgacagaaccaggtactttagcatgtggaactctgcggtggacagctatgatcccgatgtcaggatcattgaaaatcatggtgtggaagatgaacttccaaactattgcttcccattggatggctctggaactaattccacatatcaaggtgtaaaaattacagatggaaatggtgctttgcaaaacggatgggcaaaagatgatgcaatctcgagacaaaaccaaatctgcaagggcaacatctacgccatggagatcaacctccaggccaacctgtggaagagttttctgtactcgaacgtggccctgtacctgcccgactctttcaagtacacgccggccaacgtcactctgcccaccaacaccaacacctacgagtacatgaacggccgcgtggtggccccctcgctggtggacgcctacatcaacatcggcgcccgctggtcgctggaccccatggacaatgtcaaccccttcaaccaccaccgcaacgcgggcctgcgctaccgctccatgttgctaggcaacggccgctacgtgcccttccatatccaagtgccccaaaagttctttgccatcaagaacctgctcctactcccgggctcctacacctacgagtggaacttccgcaaggacgtcaacatgatcctgcagagttccctcggcaacgacctgcgcgtcgacggcgcctccgtgcgcttcgacagcgtcaacctctacgccaccttcttccccatggcgcacaacaccgcctccaccctggaagccatgctgcgcaacgacaccaacgaccagtccttcaacgactacctctcggccgccaacatgctctaccccatcccggccaaggccaccaacgtgcccatctccatcccctcgcgcaactgggccgccttccgcggctggagtttcactcgcctgaaaaccaaggaaactccctcgctcggctcgggtttcgacccctactttgtctactcgggctccattccctacctcgacgggaccttctacctaaaccacaccttcaagaaggtctccatcatgttcgactcctcggtcagctggcccggcaacgaccggctgctcacgccgaacgagttcgaaatcaagcgcagcgtcgacggggagggctacaacgtggcccaatgcaacatgaccaaggactggttcctcgtccagatgctctcccactacaacatcggctaccagggcttccacgtgcccgagggctacaaggaccgcatgtattccttcttccgcaacttccagcccatgagcaggcaggtggtcgatgagatcaactacaaggactacaaggccgtcaccctgcccttccagcacaacaactcgggcttcaccggctacctcgcacccaccatgcgtcaggggcagccctatcccgccaacttcccctacccgctcatcggctccaccgcagtgccctccgtcacccagaaaaagttcctctgcgacagggtcatgtggcgcatccccttctccagcaacttcatgtccatgggcgcccttaccgacctgggtcagaacatgctctacgccaactcggctcacgcgctcgacatgaccttcgaggtggaccccatggatgagcccaccctcctctatcttctctttgaagttttcgacgtggtcagagtgcaccagccgcaccgcggcgtcatcgaggccgtctacctgcgcacgcccttctccgccggcaacgccaccacctaagcatgagcggctccagcgaaagagagctcgcggccatcgtgcgcgacctgggctgcgggccctactttttgggtacccacgacaagcgcttcccgggcttccttgccggcgacaagctggcctgcgccatcgtcaacacggccggccgcgagaccgggggcgtgcactggctcgccttcggctggaacccgcgctcgcgcacctgctacatgttcgacccctttgggttctcggaccgccggctcaagcagatttacagcttcgagtacgaggccatgctgcgccgcagcgccctggcctcctcgcccgaccgctgtctcagcctcgagcagtccacccagaccgtgcaggggcccgactccgccgcctgcggacttttctgttgcatgttcttgcatgccttcgtgcactggcccgaccgacccatggacggaaaccccaccatgaacttgctgacgggggtgcccaacggcatgctacaatcgccacaggtgctgcccaccctccggcgcaaccaggaggagctctaccgcttcctcgcgcgccactccccttactttcgctcccaccgcgccgccatcgaacacgccaccgcttttgacaaaatgaaacaactgcgtgtatctcaataaacagcacttttattttacatgcactggagtatatgcaagttatttaaaagtcgaaggggttctcgcgctcgtcgttgtgcgccgcgctggggagggccacgttgcggaactggtacttgggctgccacttgaactcggggatcaccagtttgggcactggggtctcggggaaggtctcgctccacatgcgccggctcatctgcagggcgcccagcatgtcaggcgcggagatcttgaaatcgcagttggggccggtgctctgcgcgcgcgagttgcggtacactgggttgcagcactggaacaccatcagactggggtacttcacactagccagcacgctcttgtcgctgatctgatccttgtccaggtcctcggcgttgctcaggccgaacggggtcatcttgcacagctggcggcccaggaagggcacgctctgaggcttgtggttacactcgcagtgcacgggcatcagcatcatccccgcgccgcgctgcatattcgggtagagggccttgacgaaggccgcgatctgcttgaaagcttgctgggccttggccccctcgctgaaaaacaggccgcagctcttcccgctgaactgattattcccgcacccggcatcatggacgcagcagcgcgcgtcatggctggtcagttgcaccacgctccgtccccagcggttctgggtcaccttggccttgctgggttgctccttcagcgcgcgctgtccgttctcactggtcacatccatctccaccacgtggtccttgtggatcatcaccgttccatgcagacacttgagctggccttccacctcggtgcagccgtgatcccacagggcgcagccggtgcactcccaattcttgtgcgcgatcccgctgtggctgaaaatgtaaccttgcaacaggcgacccatgacggtgctaaatgctttctgggtggtgaaggtcagttgcagaccgcgggcctcctcgttcatccaggtctggcacatcttttggaagatctcggtctgctcgggcatgagcttgtaagcatcgcgcaggccgctgtcgacgcggtagcgttccatcagcacgttcatggtatccatgcccttctcccaggacgagaccagaggcagactcagggggttgcgcacgttcaggacaccgggggtcgcgggctcgacgatgcgttttccgtccttgccttccttcaacagaaccggcggctggctgaatcccactcccacgatcacggcttcttcctggggcatctcttcgtctgggtctaccttggtcacatgcttggtctttctggcttgcttcttttttggagggctgtccacggggaccacgtcctcctcggaagacccggatcccacccgctgatactttcggcgcttggttggcagaggaggtggcggcgaggggctcctctcctgctccggcggatagcgcgctgaaccgtggccccggggcggagtggcctctcggtccatgaaccggcgcacgtcctgactgccgccggccattgtttcctaggggaagatggaggagcagccgcgtaagcaggagcaggaggaggacttaaccacccacgagcaacccaaaatcgagcaggacctgggcttcgaagagccggctcgtctagaacccccacaggatgaacaggagcacgagcaagacgcaggccaggaggagaccgacgctgggctcgagcatggctacctgggaggagaggaggatgtgctgctcaaacacctgcagcgccagtccctcatcctccgggacgccctggccgaccggagcgaaacccccctcagcgtcgaggagctgtgtcgggcctacgagctcaacctcttctcgccgcgcgtaccccccaaacgccagcccaacggcacatgcgagcccaacccgcgtctcaacttctatcccgtctttgcggtccccgaggccctcgccacctatcacatctttttcaagaaccaaaagatccccgtctcctgccgcgccaaccgcacccgcgccgacgcgctcctcgctctggggcccggcgcgcgcatacctgatatcgcttccctggaagaggtgcccaagatcttcgaagggctcggtcgggacgagacgcgcgcggcgaacgctctgaaagaaacagcagaggaagagggtcacactagcgccctggtagagttggaaggtgacaacgccaggctggccgtgctcaagcgcagcgtcgagctcacccactttgcctaccccgccgtcaacctcccgcccaaggtcatgcgtcgcatcatggatcagctcatcatgccccacatcgaggccctcgatgagacccaagagcagcgccccgaggacgcccggcccgtggtcagcgacgagatgctcgcgcgctggctcgggacccgcgagccccaggctttggaacagcggcgcaagctcatgctggccgtggtcctggtcaccctcgagctcgaatgcatgcgccgcttcttcagcgaccccgagaccctgcgcaaggtcgaggagaccctgcactacactttcagacacggtttcgtcaggcaggcctgcaagatttccaacgtggagctgaccaacctggtctcctgcctggggatcctgcatgagaaccgcctgggacagaccgtgctccactctaccctgaagggcgaggcgcggagggactatgtccgcgactgcgtctttctctttctctgccacacatggcaagcagccatgggcgtgtggcagcagtgtctcgaggacgagaatctgaaggagctggacaagcttcttgctagaaaccttaaaaagctttggacgggcttcgacgagcgcaccgtcgcctcggacctggccgagatcgtcttccccgagcgcctgaggcagacgctgaaaggcgggctgcccgacttcatgagccagagcatgttgcaaaactaccgcactttcattctcgagcgatcggggatgctgcccgccacctgcaacgctttcccctccgactttgtcccgctgagctaccgcgagtgtcccccgccgctgtggagccactgctacctcttgcagctggccaactacatcgcctaccactcggacgtgatcgaggacgtgagcggcgaggggcttctcgagtgccactgccgctgcaacctgtgctccccgcaccgctccctggtctgcaacccccagctccttagcgagacccaggtcatcggtaccttcgagctgcaaggtccgcaggagtccaccgctccgctgaaactcacgccggggttgtggacttccgcgtacctgcgcaaatttgtacccgaggactaccacgcccatgagataaagttcttcgaggaccaatcgcgtccgcagcacgcggatctcacggcctgcgtcatcacccagggcgcgatcctcgcccaattgcacgccatccaaaaatcccgccaagagtttcttctgaaaaagggtagaggggtctacctggacccccagacgggcgaggtgctcaacccgggtctcccccagcatgccgaggaagaagcaggagccgctagtggaggagatggaagaagaatgggacagccaggcagaggaggacgaatgggaggaggagacagaggaggaagaattggaagaggtggaagaggagcaggcaacagagcagcccgtcgccgcaccatccgcgccggcagccccgccggtcacggatacaacctccgcagctccggtcaagcctcctcgtagatgggatcgagtgaagggtgacggtaagcacgagcggcagggctaccgatcatggagggcccacaaagccgcgatcatcgcctgcttgcaagactgcggggggaacatcgctttcgcccgccgctacctgctcttccaccgcggggtgaacatcccccgcaacgtgttgcattactaccgtcaccttcacagctaagaaaaagcaagtaagaggagtcgccggaggaggaggcctgaggatcgcggcgaacgagcccttgaccaccagggagctgaggaaccggatcttccccactctttatgccatttttcagcagagtcgaggtcagcagcaagagctcaaagtaaaaaaccggtctctgcgctcgctcacccgcagttgcttgtaccacaaaaacgaagatcagctgcagcgcactctcgaagacgccgaggctctgttccacaagtactgcgcgctcactcttaaagactaaggcgcgcccacccggaaaaaaggcgggaattacctcatcgccaccatgagcaaggagattcccaccccttacatgtggagctatcagccccagatgggcctggccgcgggcgcctcccaagactactccacccgcatgaactggctcagtgccggcccctcgatgatatcacgggtcaacggggtccgtaaccatcgaaaccagatattgttggagcaggcggcggtcacctccacgcccagggcaaagctcaacccgcgtaattggccctccaccctggtgtatcaggaaatccccgggccgactaccgtactacttccgcgtgacgcactggccgaagtccgcatgactaactcaggtgtccagctggccggcggcgcttcccggtgcccgctccgcccacaatcgggtataaaaaccctggtgatccgaggcagaggcacacagctcaacgacgagttggtgagctcttcgatcggtctgcgaccggacggagtgttccaactagccggagccgggagatcctccttcactcccaaccaggcctacctgaccttgcagagcagctcttcggagcctcgctccggaggcatcggaaccctccagttcgtggaggagtttgtgccctcggtctacttcaaccccttctcgggatcgccaggcctctacccggacgagttcataccgaacttcgacgcagtgagagaagcggtggacggctacgactgaatgtcctatggtgactcggctgagctcgctcggttgaggcatctggaccactgccgccgcctgcgctgcttcgcccgggagagctgtggcctcatctactttgagtttcccgaggagcaccccaacggccctgcacacggagtgcggatcaccgtagagggcaccaccgagtctcacctggtcaggttcttcacccagcaacccttcctggtcgagcgggaccggggcgccaccacctacaccgtctactgcatctgtcctaccccgaagttgcatgagaatttttgctgtactctttgtggtgagtttaataaaagctgaactaagaacctactttggaatcccttgtcgtcatcctcggaacaagaccgtcttctttaccaaccagaccaaggttcgtctgaactgcacaaccaacaggaagtaccttctctggacttttcaagacacctcactcgctgttgtcaatacccgtgacaacgacggtgttttaatccccaacaacctcaccagtggacttactttctctaccaacaaaacaaagctcatccttcaccacccttttgtagagggaacctaccagtgccgacacggaccttgtgttcacaacttccatttggtgaaccttaccagcagcagcacagttgctcctgaaagtaacctttcttctgatactaacaaacctcgtgtcggaggtgagctttgggttccatctctaacagagggtgggagttctattgaagtggttgggtatttgattttaggggtggtccttggtgggtgcatagcagtgctgtatcaacttccttgctgggtcgaaatcagggtatttatctgctgggtcagacattgtggggaggaaccatgaaggggctcttgctgattatcctttccctggtggggggtgtactgtcatgccacgaacagccacgatgtaacatcaccacaggcaatgagagaagcgaatgctctgtagttatcaaatgtgagcacaaatgttctctcaacattacattcaagaataagaccatgggaaatgtatgggtgggcttctggcaaccaggagatgagcagaactacacggtcactgtccatggtagcgatggcaaacacactttcggtttcaaattcatttttgaagtcatgtgtgatatcacactgcatgtggctagacttcatggcttgtggccccctaccaaggagaacatggtgggtttttctttggcttttgtgatcatggcctgcttgatgtcaggtctgctggtaggggctttagtgtggttcctgaagcgcaagcctaggtatggaaatgaggagaaggaaaaattgctataaatctttttctcttcgcagaaccatgaatactttgaccagtgtcgtgctgctctctcttcttgtagcttttagtcagggacaagctgtgcatgtgaaacttgaaatttgttatggttgtaatggtacactaataggaccacataaaactccagttgagtggtatgacggcagaggacacaaactttgtgcaggatctgatacttttcacaaggaactaaatcacacatgtgatttacaaaatatgacacttacatttgttaacttaactcataagggtacttactatggttttggcagtgataacaaaaactctaaagtataccaggttactattaagccacctgttctgacaactcgcaggcctttattaaaacctgaagatattgtaatcactaagggaagcaacaaaactcttgtgggtcctccagatacaccagttgactggtatgatggttcaggacataaattgtgtaaaggaaaagaagttcattaccctgaactcaatcacacctgtgatgagcagaaccttacactcatatttgtaaatgccacttttaagggaacctattatggctttagaaaagatggcacagacaaaaaggaatatagagtcaaaattgatgatttatatgcaaaacaactaaaacaggaaaaagatgaaaaaccaaggtctggccatgataagcagaaatcaaaaacagaagaaaaacaaaatccaaaaacagaagaaaggcatgggcatagagatgttgttaaagaagttagctttagaactggaactaatcaaactctagtgggcccaccagggtctaaggttgattggcttaaagttggaaatggtgggacatttagcgaactttgtaaaagcgataataaacactattcttgtaattctcaaaacttaacaataatcaatgttaccagatttgatgaaggtagctattatggctctaatgacggttcagctcattacagagtttcagtctacgacccagtacagaaaaaaagggttatgaaaatacaaccacacacaacaaaaactactgcaaaaaaaactacaaaaagcagcactaatgaaacagatgaaaactttgctttgcaacagggtaacaatggggaaaatcaatatgatgaaactaatattccttcaactactgtggcaatcgtggtgggagtgattgcgggcttcataactataatcattgtcattctgtgctacatctgctgccgcaagcgtcccagggcatacaatcatatggtagacccactactcagcttctcttactgagactcagtcactttcatttcagaaccatgaaggctttcacagcttgcgttctgattagcctagtcacacttagtttagccaaaattaatcaaatcagtgtcaaaagaggtgaaaatgttacactagatggaacttatccaaatactacatggacaagatatcaccttacaaaatgggataatatttgcaaatggaatatttcaacatataaatgtcataataatggaagcattacaattcatacttttaatatcacttctggattatacaagggagatagctataaaagagaagtgattacatcaatgtctagatttggaaatatgacagacacttatttcagcgaatatcaacaattaaaaatgtataatttaacaataattgaaccaccaactactaaagcacccactaccactaagcctaccacagttaagacaacacaacctaccactgtgcccactacacatcaaaccaccgcagtcagtacaactattgaaaccactactcacactacacagctagacactacagtgcagaatagtactgtgttggttaggtatctgttgagggaggaaagtactactgaacagacagaggctacctcaagtgccttcagcagcactgcaaatttaacttcgcttgcttcaataaatgagaccctcgtgccgatgaaacaggatcaacctaattactcaggtttggatatgcaaattactttcttaattgtctgtggagtctttattcttgtggttcttctttactttgtcttttgcaaagccagacaaaaatctcatagaacaatctacaggccagtgattggggaacctcagcccctccaagtggacggaggcttaaggaatcttctcttctcttttacagtatggtgatcagccatgattcctaggttcttcctatttaacatcctcttctgtctcttcaacatctgtgctgccttcgcggccgtctcgcacgcatcgcccgactgtctcgggcccttcccaacctacctcctctttgccctgctaacctgcacctgcgtctgcagcattgtctgcctggtcatcaccttcctgcagctcatcgactggtgctgcgcgcgctacaattacctacaccacagtcccgaatacagggacgagaacgtagccagaatcttaaggctcatctgaccatgcagactctgctcatactgctatccctcctataccctgcccttgctgatgattactctaagtgcaaattcgcggacatatggaatttcttagactgctatgatgctaaaatggatatgccttcctattacttggtaattgtggggatagtcatggtctgctcctgcactttctttgccatcatgatctacccctgttttgatcttggctggaactctgttgaggcattcacatacacactagaaagcagttcactagcctccacaccaccacccacaccgcctccccgcagaaatcagtttcccatgattcagtacttagaagagccccctccccggcccccttccactgttagctactttcacataaccggcggcgatgactgacaaccacctggacctcgagatggacggccaggcctccgagcagcgcatcctgcaactgcgcgtccgtcagcagcaggagcgggccgccaaggagctcctcgatgccatcaacatccaccagtgcaagaagggcatcttctgcctggtcaaacaggcaaagatcacctacgagctcgtgtccggcggcaagcagcatcgcctcgcctatgagctgccccagcagaagcagaagttcacctgcatggtgggcatcaaccccatagtcatcacccagcagtcgggcgagaccaacggctgcatccactgctcctgcgaaagccccgagtgcatctactccctgctcaagaccctttgcggactacgcgacctcctccccatgaactgatgttgattaaaagcccaaaaaccaatcagccccttccccatccaaaattaatcatatgaataaatcattggaattaaacattcaataaagatcacttacttgaaatctgaaagtatgtctctggtgtagttgttcagcagcacctcagtaccctcctcccagctctgatactccagtccccggcgggcggcaaacttcctccacaccttgaaagggatgtcaaattcctggtccacaattttcattgtcttccctctcagatgtcaaagaggctccgggtggaagatgacttcaaccccgtctacccctatggctacgcgcggaatcagaatatccccttcctcactcctccctttgtctcctccgatggattcaaaaacttccccccaggggtcctgtcactcaaactggctgacccaatcaccataactaatggagatgtctcgctcaaggtgggagggggacttgttgtggaaaaagagtctggaaagctaagtgttgaccctaagactcccttgcaagttgcaagtgacaacaaattggagctttcttataatgctccatttaaagttgaaaatgacaagctatcacttgatgtaggccacggattaaaagttataggcaatgaagtatcaagcttgcctggattaataaataagcttgttgttttaactgggaagggaattggcactgaagagttaaaagaacaaaacagtgataaaataataggagttggaattaatgtaagagcaagaggaggattgtcatttgacaatgatggctacttagtagcttggaatccaaagtatgatacacgtacactttggacaactccagacacatctcctaattgcaagatgcttacaaaaaaggactcaaagcttacactcacacttacaaagtgcggaagtcaaattttaggaaacgtatctttacttgctgtttcgggaaagtatcttaatatgacaaaggacgaaacaggagttaagataattttactatttgacagaaatggagttcttatgcaggaatcatcactcgataaagaatattggaactatagaaatgacaataatgttatcggaactccttatgaaaatgcagtggggtttatgccaaacttagtggcatatcctaaaccgacaagtgcagatgcaaaaaactattcaagaagcaagataataagtaatgtatacttaaagggtcttatatatcaaccagtaattataattgccagttttaatcaggaaaccactaatggttgtgtctattctatttcatttgatttcacctgttcaaaggattacactggccaacaatttgatgttacctcattcactttctcctatatcgcccaagaatgaaagaccaataaacgtgtttttcatttgaaaattttcatgtatctttattgatttttacaccagcacgggtagtcagtctcccaccaccagcccatttcacagtgtaaacaattctctcagcacgggtggccttaaataggggaatgttctgattagtgcgggaactgaacttggggtctataatccacacagtttcctggcgagccaaacgggggtcggtgattgagatgaagccgtcctctgaaaagtcatccaagcgggcctcgcagtccaaggtcacagtctggtggaatgagaagaacgcacagattcatactcggaaaacaggatgggtctgtgcctctccatcagcgccctcaacagtctttgccgccggggctcggtgcggctgctgcagatgggatcgggatcgcaagtctctctgactatgatccccacagccttcagcatcagtctcctggtgcgtcgggcacagcaccgcatcctgatctcgctcatgttctcacagtaagtgcagcacataatcaccatgttattcagcagcccataattcagggtgctccagccaaagctcatgttggggatgatggaacccacgtgaccatcataccagatgcggcagtatatcaggtgcctgcccctcatgaacacactgcccatatacatgatctctttgggcatgtttctgttcacaatctgccggtaccaggggaatcgctggttgaacatgcacccgtaaatgactctcctgaaccacacggccagcagggtgcctcccgcccgacactgcagggagcccggggatgaacagtggcaatgcaggatccagcgctcgtacccgctcaccatctgagctcttaccaagtccagggtagcggggcacaggcacactgacatacatctttttaaaatttttatttcctctggggacaggatcatatcccaggggactggaaactcttggagcagggtaaagccagcagcacatggcaatccacggacagaacttacattatgataatctgcatgatcacaatcgggcaacagagggtgttgttcagtcagagaggccctggtctcctcatcagatcgtggtaaacgggccctgcgatatggatgatggcggagcaagctcgactgatcctcggtttgcattgtagtggattctcttgcgtaccttgtcgtacttctgccagcagaaatgggcccttgaacagcagatacctctccttctcctgtctttccgctgctgacgctcagtcatccaactgaagtacagccattcccgcaggttctcgagcagctcctcagcatctgatgaaacaaaagttctgtccatgcggattccccttaacacatcagccaggacattgtaggccatcccaatccagttaatgcagcctggtctatcattcagaggaggtgggggaagaactggaagaaccatttttattccaagcggtctcgaaggacgataaagtgcaagtcacgcaggtgacagcgttccccgccgctgtgctggtggaaacagacagccaggtcaaaacctactctattttcaaggtgctcgactgtggcttcgagcagtggctctacgcgtacatccagcataagaatcacattaaaggctggccctccatcgatttcatcaatcatcaggttacactcattcaccattcccaggtaattctcatttttccagccttgaattatttctacaaattgttggtgtaagtccactccgcacatgtggaaaagttcccacagcgccccctccactttcataatcaggcagaccttcataatagcaacaaatctggctgctccaccacctgcagcgtgttcaaaacaacaagattcaatgagtttctgccctctgccctgagctcgcgtctcagcgtcagctgtaaaaagtcactcaagtcctcggccactacagatgccaattcagagccagggctaagcgtgggactggcaagcgtgatggagtactttaatgctccaaagctagcacccaaaaactgcacgctggaataagctctctttgtgtcaccggtgattccttccaaaaggtgagtgataaagcgaggtaggtgctctctaatcatagcagtaatggaaaaatcctctaaataagtcactagggccccagggaccacaatgtggtagctgacagcgcgtcgctcaagcatggttagtagagatgagagtctgaaaaacagaaagcatgcactaaaccagagtggcaagtcttactgaaggaaaaatcactctctccagcagcaaagtgcccactgggtggccctctcggacatacaaaaatcgatccgtgtggttaaagagcagcacagttagctcctgtcttctcccagcaaagatcacatcggactgggttagtatgcccctggaatggtagtcattcaaggccataaatctgccttggtagccattaggaatcagcacgctcactctcaagtgaaccaaaaccaccccatgcggaggaatgtggaaagattcggggcaaaagaaattatatctattgctagtcccttcctggacgggagcgatccctccagggctatctatgaaagcatacagagattcagccatagctcagcccgcttaccagtagacagagagcacagcagtacaagcgccaacagcagcgactgactacccactaacccagctccctatttaaaggcaccttacactgacgtaatgaccaaaggtctaaaaaccccgccaaaaaaaacacacacgccctgggtgtttttcgcgaaaacacttccgcgttctcacttcctcgtaacgatttcgtgactcaacttccgggttcccacgttacgtcacttttgcccttacatgtaactcagccgtaaggcgccatcttgcccacgtccaaaatggcttccatgtccggccacgcctccgcggcgaccgttagccgtgcgtcgtgacgtcatttgcatcaacgtttctcggccaatcagcagtagccccgccctaaatttaaaacctcatttgcatattaacttttgtttactttgtggggtatattattgatgatg

SEQ ID NO: 28 - DNA, 35121 bp, Adenovirus D33
  MISC_FEATURE (1)..(35121): Complete Genome
catcatcaataatataccccacaaagtaaacaaaagttaatatgcaaatgaggttttaaatttagggcggggctactgctgattggccgagaaacgttgatgcaaatgacgtcacgacgcacggctaacggtcgccgcggaggcgtggcctagcccggaagcaagtcgcgtggctgatgacgtataaaaagcggactttagacccggaaacggccgattttcccgcggccacgcccggatatgaggtaattctgggcggatgcaagtgaaattaggtcattttggcgcgaaaactgaatgaggaagtgaaaagcgaaaaataccggtcccgcccagggcggaatatttaccgagggccgagagactttgaccgattacgtgggggtttcgattgcggtgtttttttcgcgaatttccgcgtccgtgtcaaagtccggtgtttatgtcacagatcagctgatccacagggtatttaaaccagtcgagcccgtcaagaggccactcttgagtgccagcgagtagagatttctctgagctccgctcccagagtgtgagaaaaatgagacacctgcgcctcctgcctgaaactgtgcctatggacatggctgtgcttctactggatgactttgtgaatacagtattggaggatgaactgcatccaactccgtttgagctgggacccacacttcaggacctatatgatctggaggtagatgcccatgatgacgacccgaacgaagaggctgtgaatttaatatttccagaatctatgattcttcaggctgacatagccaacgaatctatacctactccacttcatacaccgactctgtcacccatacctgaattggaagaggaggacgaactagacctccggtgttatgaggaaggttttcctcccagcgattcagaggacgaacagggtgagcagagcatggctataatctcagactatgcttgtgtggttgtggaagagcattttgtgttggacaatcctgaggtgcccgggcaaggctgtagatcctgccaatatcaccgggatcagaccggagacccaaatgcttcatgcgctctgtgttacatgaaaaagactttcagctttatttacagtaagtggagtgaatgtgagagaggctgagtgcttaacacataactgtaatgcttgaacagctgtgctaagtgtggtttatttttgttactaggtccggtgtcagaggatgagtcatcgccctcagaagacgaccacccgtctccccccgatctcacagatgacacgcccctgcaagtgatcagacccaccccagtcagactcagtggggagaggcgaatggctgttgacaaaatcgaggacttgttgcaggacatgggtggggatgaacctttggacctgagcttgaaacgccccaggaactaggcgcagctgtgctgagtcatgtgtaaataaagttgtacaataaaagtatatgtgacgcatgcaaggtgtggtttatgactcatgggcggggcttagtcctatataagtgctaacacctgggcacttaggcacagaccttcaggagctcctgatggaggtgtggactatccttgcagactttagcaagacacgccggcttgtagaggatagttcagacgggtgctccgggttctggagacactggtttggaactcctctatctcgcctggtgtacacagttaagaaggattataacgaggaatttgaaaatctttttgccgactgctctggcctgcttgattctctgaattttggccaccagtcccttttccaggaaagggtcctccacagccttgatttttccagcccagggcgcactacagccggggttgcttttgtggtttttctggttgacaaatggagccagaacacccaactgagcaggggctacattctggacttcgcggccatgcacctgtggagggcctgggtcaggcagcggggacagagaatcttgaactactggcttctacagccagcagctccgggtcttcttcgtctacacagacaaacatccatgttggaggaagaaatgaggcaggccatggacgagaacccgaggagcggcctggaccctccgtcggaagaggagctggattgaatcaggtatccagcctgtacccagagcttagcagggtgctgacatccatggccaggggagtgaagagggagaggagcgatgggggcaataccgggatgatgacagagctgacggccagcctgatgaatcgcaagcgcccagagcgcattacctggcatgagctacagatggagtgcagggatgaggtgggcctgatgcaggataaatatggcctggagcagataaaaacccactggttgaacccagatgaggattgggaggaggccattaagaaatatgccaagatagccctacgcccagattgcaagtacagggtgaccaagacggtgcatatcagacatgcctgctacatctcagggaacggggcagaggtggtcatcgataccctggacaaggccgccttcaggtgttgcatgatgggaatgagagccggagtgatgaatatgaattccatgatctttatgaacatgaagttcaatggagagaagtttaatggggtgctgttcatggccaacagccacatgaccctgcatggctgcgactttttcggctttaacaatatgtgcgcagaggtctggggcgcttccaagatcaggggatgtaagttttatggctgctggatgggcgtggtcggaagacccaagagcgagatgtctgtgaagcagtgtgtgtttgagaaatgctacctgggagtctctaccgagggcaatgctagagtgagacactgctcttccctggagacgggctgcttctgcctggtgaagggcacagcctctctgaagcataatatggtgaagggctgcacggatgagcgcatgtacaacatgctgacatgcgactcgggggtctgccatattctgaagaacatccatgtgacctcccacccccggaagaagtggccagtgtttgagaataacctgcttatcaagtgccacgtgcacctgggtgccagaaggggcaccttccagccgtaccagtgtaactttagccagaccaagctgctgttggagaacgatgccttctccagggtgaacctgaacggcatctttgacatggatgtctcggtgtacaagatcctgagatacgatgagaccaagtccagggtgcgcgcttgcgagtgcgggggcagacacaccaggatgcagccagtggccctggatgtgaccgaggagctgagaccagaccacctggtgatggcctgtaccgggaccgagttcagctccagtggggaggacacagattagaggtaggtttgagtagtgggcgtggctaaggtgactataaaggcgggtgtcttacgagggtctttttgcttttctgcagacatcatgaacgggactggcggggccttcgaaggggggctttttagcccttatttgacaacccgcctgccgggatgggccggagttcgtcagaatgtgatgggatcgacggtggacgggcgcccagtgcttccagcaaattcctcgaccatgacctacgcgaccgtggggaactcgtcgcttgacagcaccgccgcagccgcggcagccgcagccgccatgacagcgacgagactggcttcgagctacatgcccagcagcagcagtagcccctctgtgcccagttccatcatcgccgaggagaaactgctggccctgctggccgagctggaagccctgagccgccagctggccgccctgacccagcaggtgtccgatctccgcgagcaacagcagcaaaataaatgattcaataaacacagattctgattcaaaagcaaagcatctttattatttattttttcgcgcgcggtaggccctggtccacctttcccgatcattgagagtgcggtggattttttccaggacccggtagaggtgggattggatgttgaggtacatgggcatgagcccgtcccgggggtgtaggtagcaccactgcatggcctcgtactctggggtcgtgttgtagatgatccagtcatagcaggggcgctgggcgtggtgctggatgatgtccttgaggaggagactgatggccacggggagccccttggtgtaggtgttggcaaagcggttgagctgggagggatgcatgcggggggagatgatgtgcagtttggcctggatcttgaggttggcaatgttgccgcccagatcccgcctggggttcatgttgtgcaggaccaccaggacggtgtagcccgtgcacttggggaacttatcatgcaacttggaagggaatgcgtggaagaatttggagacgcccttgtgcccgcccaggttttccatgcactcatccatgatgatggcaatgggcccgtgggctgcggctttggcaaagacgtttctggggtcagagacatcgtaattatgctcctgggtgagatcatcataagacattttaataaatttggggcggagggtgccagattgggggacgatggttccctcgggccccggggcaaagttcccctcgcagatctgcatctcccaggctttcatctcggagggggggatcatgtccacctgcggggcgatgaaaaaaacggtttccggggcgggggtgatgagctgcgaggagagcaggtttctcaacagctgggacttgccgcacccggttgggccgtagatgaccccgatgacgggttgcaggtggtagttcaaggagatgcagctgccgtcgtcccggaggaggggggccacctcgttgagcatgtccctgacttggaggttttcccggacgagctcgccaaggaggcggtctccgccgagcgagagtagctcttgcagggaagcaaagtttttcaggggcttgagcccgtcggccatgggcatcttggcgagggtctgcgagagtagctccaggcggtcccagagctcggtgacgtgctctacggcatctcgatccagcagacttcctcgtttcgggggttgggacgactgcgactgtagggcacgagacgatgggcgtccagcgctgccagcgtcatgtccttccatggtctcagggtccgcgtgagcgtggtctccgtcacggtgaaggggtgggccccgggctgggcgcttgcaagggttcgcttgagactcatcctgctggtgctgaaacgggcacggtcttcgccctgcgcgtcggcgagatagcagttgaccatgagctcgtagttgagggcctcggcggcgtggcccttggcgcggagcttgcccttggaagagcgcccgcaggcgggacagaggagggattgcagggcgtagagcttgggtgcgagaaagacggactcgggggcgaaggcgtccgctccgcagtgggcgcagacggtctcgcactcgacgagccaggtgagctcggggtgttcggggtcaaaaaccagttttcccccgttctttttgatgcgcttcttacctcgcgtctccatgagtctgtgtccgcgctcggtgacaaacaggctgtctgtgtccccgtagacggacttgatgggcctgtcctgcaggggcgtcccgcggtcctcctcgtagagaaactcggaccactctgagacaaaggcgcgcgtccacgccaagacaaaggaggccacgtgcgaggggtagcggtcgttgtccaccagggggtccactttttccacggtatgcaggcacatgtccccctcctccgcatccaagaaggttattggcttgtaggtgtaggccacgtgacctggggtccccgacgggggggtataaaagggggcgggtctgtgctcgtcctcactctcttccgcgtcgctgtccacgagcgccagctgttggggtaggtattccctctcgagagcgggcatgacctcggcactcaggttgtcagtttctagaaacgaggaggatttgatgttggcttgccctgccgcgatgctttttaggagactttcatccatctggtcagaaaagactatttttttattgtcaagcttggtggcgaaggagccatagagggcattggagagaagcttggcgatggatctcatggtctgatttttgtcacggtcggcgcgctccttggccgcgatgttgagctggacatactcgcgcgcgacgcacttccattcggggaagacggcggtgcgctcgtcgggcacgatcctgacgcgccagccgcggttatgcagggtgaccaggtccacgctggtggccacctcgccgcgcaggggctcgttggtccagcagagtctgccgcccttgcgcgagcagaaagggggcaacacatcaagcagatgctcgtcaggggggtccgcatcgatggtgaagatgccgggacatagttccttgtcaaaatagtctatttttgaggatgcatcatccaaggccatctgccactcgcgggcggccatcgctcgctcgtaggggttgaggggcggaccccagggcatggggtgcgtgagcgcggaggcatacatgccgcagatgtcatacacatagatgggctctgagaggatgccgatgtaggtgggataacagcgccccccgcggatgctggcgcgcacgtagtcatacaactcgtgcgagggggccaagaaggcggggccgagattggtgcgctggggctgctcggcgcggaagacgatctggcgaaagatggcgtgcgagttggaggagatggtgggccgttggaagatgttaaagtgggcgtggggcagtcggaccgagtcgcggatgaagtgcgcgtaggagtcttgcagcttggcgacgagctcggcggtgacgaggacgtccatggcgcagtagtccagcgtttctcggatgatgtcataacccgcctctcctttcttctcccacagctcgcggttgagggcatactcctcgtcatccttccagtactcccggagcgggaatcctcgatcgtccgcacggtaagagcccagcatgtagaaatggttcacggccttgtagggacagcagcccttctccacggggagggcgtaagcttgagcggccttgcggagcgaggtgtgagtcagggcgaaggtgtccctgaccatgactttcaagaactggtacttgaagtccgagtcgtcgcagccgccgtgctcccagagctcgaaatcggtgcgcttcttcgagagggggttaggcagagcgaaagtgacgtcattgaagagaatcttgcctgctcgcggcatgaaattgcggctgatgcggaaagggcccgggacggaggctcggttgttgatgacctgggcggcgaggacgatctcgtcgaagccgttgatgttgtgcccgacgatgtaaagttccatgaatcgcgggcggcctttgatgtgcggcagctttttgagctcctcgtaggtgaggtcctcggggcattgcaggccgtgctgctcgagggcccactcctggagatgtgggttggcttgcatgaaggaagcccagagctcgcgggccatgagggtctggagctcgtcgcgaaagaggcggaactgctggcccacggccatcttttctggggtgacgcagtagaaggtgagggggtcccgctcccagcgatcccagcgtaagcgcacggcgagatcgcgagcgagggcgaccagctcggggtcccccgagaatttcatgaccagcatgaaggggacgagctgcttgccgaaggaccccatccaggtgtaggtttctacatcgtaggtgacaaagagccgctccgtgcgaggatgagagccgattgggaagaactggatttcctgccaccagttggacgagtggctgttgatgtgatgaaagtagaaatcccgccggcgaaccgagcactcgtgctgatgcttgtaaaagcgtccgcagtactcgcagcgctgcacgggctgtacctcatccacgagatacactgcgcgtcccttgaggaggaacttcaggagtggcggccctggctggtggttttcatgttcgcctgcgtgggactcaccctggggctcctcgaggacggagaggctgacgagcccgcgcgggagccaggtccagatctcggcgcggcgggggcggagagcgaagacgagggcacgcagttgggagctgtccatggtgtcgcggagatccaggtccgggggcagggttctgaggttgacctcgtagaggcgggtgagggcgtgcttgagatgcagatggtacttgatttccactggggagttggtggccgtgtccacgcattgcatgagcccgtagctgcgcggggccacgaccgtgccgcggtgcgcttttagaagcggtgtcgcggacgcgctcccggcggcagcggcggttccggccccgcgggcaggggcggcagaggcacgtcggcgtggcgctcgggcaggtcccggtgctgcgccctgagagcgctggcgtgcgcgacgacgcggcggttgacatcctggatctgccgcctctgcgtgaagaccacgggccccgtgactttgaacctgaaagacagttcaacagaatcaatctcggcgtcattgacggcggcctgacgcaggatctcttgcacgtcgcccgagttgtcctggtaggcgatctcggacatgaactgctcgatctcctcctcctggagatcgccgcggcccgcgcgctcgacggtggcggcgaggtcatttgagatgcgacccatgagctgcgagaaggcgcccagcccgctctcgttccagacgcggctgtagactacgtccccgtcggcgtcgcgcgcgcgcatgaccacctgcgcgaggttgagctccacgtgccgcgtgaagacggcgtagttgcgcaggcgctggaagaggtagttgagggtggtggcgatgtgctcggtgacgaagaagtacatgatccagcggcgcaggggcatctcgctgatgtcgccgatggcctccagcctttccatggcttcgtagaaatccacggcgaagttgaaaaactgggcgttgcgggccgagaccgtgagctcgtcttccaggagccggatgagctcggcgatggtggcgcgcacctcgcgctcgaaatccccgggggcctcctcctcttcctcttcttccatgacgacctcttcttctatttcttcctctgggggcggtggtggtggcggggcccgacgacgacggcgacgcaccgggagacggtcgacgaagcgctcgatcatctccccgcggcggcgacgcatggtttcggtgacggcgcgaccccgttcgcgaggacgcagcgtgaagacgccgccggtcatctcccggtaatggggcgggtccccgttgggcagcgatagggcgctgacgatgcatcttatcaattgcggtgtaggggacgtgagcgcgtcgagatcgaccggatcggagaatctttcgaggaaagcgtctagccaatcgcagtcgcaaggtaagctcaaacacgtagtagccccgtggacgctgttagaattgcggttgctgatgatgtaattgaagtaggcgtttttaaggcggcggatggtggcgaggaggaccaggtccttgggtcccgcttgctggatgcggagccgctcggccatgccccaggcctggccctgacaccggctcaggttcttgtagtagtcatgcatgagcctctcaatgtcatcactggcggaggcggagtcttccatgcgggtgaccccgacgcccctgagcggttgcacaagcgccaggtcggcgacgacgcgctcggcgaggatggcctgttgcacgcgggtgagggtgtcctggaagtcgtccatgtcgacgaagcggtggtaggccccggtgttgatggtgtaggtgcagttggccatgagcgaccagttgacggtctgcaggccgggttgcacgatctcggagtacctgagccgcgagaaggcgcgcgagtcgaagacgtagtcgttgcaggtgcgcacgaggtactggtatccgactaggaagtgcggcggcggctggcggtagagcggccagcgctgggtggccggcgcgccaggggccaggtcctcgagcatgaggcggtggtagccgtagaggtagcgggacatccaggtgatgccggcggcggtggtggaggcgcgcgggaactcgcggacgcggttccagatgttgcgcagcggcaggaaataatccatggtcggcacggtctggccggtgagacgcgcgcagtcattgacgctctagaggcaaaaacgaaagcggttgagcgggctcttcctccgtagcctggcggaacgcaaacgggttaggccgcgtgtgtaccccggttcgagtcccctcgaatcaggctggagccgcgactaacgtggtattggcactcccgtctcgacccgagcccgatagccgccaggatacggcggagagccctttttgccggccgaggggagtcgctagacttgaaagcggccgaaaaccccgccgggtagtggctcgcgcccgtagtctggagaagcatcgccagggttgagtcgcggcagaacccggttcgcggacggccgcggcgagcgggacttggtcaccccgccgatttaaagacccacagccagccgacttctccagttacgggagcgagcccccttttttctttttgccagatgcatcccgtcctgcgccaaatgcgtcccacccccccggcgaccaccgcgaccgcggccgtagcaggcgccggcgctagccagccacagccacagacagagatggacttggaagagggcgaagggctggcgagactgggggcgccgtccccggagcgacacccccgcgtgcagctacagaaggacgtgcgcccggcgtacgtgcctccgcagaacctgttcagggaccgcagcggggaggagcccgaggagatgcgcgactgccgttttcgggcgggcagggagctgcgcgagggcctggaccgccagcgcgtgctgcgcgacgaggatttcgagccgaacgagcagacggggatcagccccgcgcgcgcgcacgtggctgcggccaacctggtgacggcctacgagcagacggtgaagcaggagcgcaacttccaaaagagtttcaacaaccatgtgcgcacgctgatcgcgcgcgaggaggtggccctgggcctgatgcacctgtgggacctggcggaggccatcgtgcagaatccggacagcaagcctctgacggcgcagctgttcctggtggtgcagcacagcagggacaacgaggcgttcagggaggcgctgctgaacatcgccgagcccgagggccgctggctgctggagctgattaacatcttgcaaagcatcgtagtgcaggagcgcagcctgagcctggccgagaaggtggcggcgatcaactactcggtgctgagcctgggcaagttttacgcgcgcaagatttacaagacgccgtacgtgcccatagacaaggaggtgaagatagacagcttttacatgcgcatggcgctcaaggtgctgacgctgagcgacgacctgggcgtgtaccgcaacgaccgcatccacaaggccgtgagcgcgagccggcggcgcgagctgagcgaccgcgagctgatgctgagcctgcgccgggcgctggtagggggcgccgccggcggcgaggagtcctacttcgacatgggggcggacctgcattggcagccgagccggcgcgccttggaggccgcctacggtccagaggacgacttggatgaggaagaggaggaggatgcacccgctgcggggtactgacgcctccgtgatgtgtttttagatgcagcaagccccggaccccgccataagggcggcgctgcaaagccagccgtccggtctagcatcggacgactgggaggccgcgatgcaacgcatcatggccctgacgacccgcaaccccgagtcctttagacaacagccacaggccaacagactttcggccattctggaggcggtggtcccctctcggaccaaccccacgcatgagaaggtgctggcgatcgtgaacgcgctggcggagaacaaggccatccgtcccgacgaggccgggctggtgtacaacgccctgctggagcgcgtgggccgctacaacagcacaaacgtgcagtccaacctggatcggctggtgacggacgtgcgcgaggccgtggcgcagcgcgagcgattcaagaacgagggccttggctcgctggtggcgctgaacgccttcctggcaacgcagccggcgaacgtgccgcgcgggcaggacgattataccaactttatcagcgcgctgcggctgatggtgaccgaggttccccagagcgaggtgtaccagtcgggcccggactactttttccagactagcagacagggcctgcagacggtgaacctgagccaggctttcaagaacctgcgcgggctgtggggcgtgcaggcgcccgtgggcgaccggtcgacggtgagcagcttgctgacgcccaactcgcggctgctgctgctgctgattgcgcccttcaccgacagcggcagcgtgaaccgcaactcgtacctgggccacctgctgacgctgtaccgcgaggccataggccaggcgcaggtggacgagcagaccttccaggagattactagcgtgagccgcgccctgggtcagaacgacaccgacagtctgagggccaccctgaacttcttgctgaccaatagacagcagaagatcccggcgcagtacgcgctgtcggccgaggaggagcgcatcctgagatatgtgcagcagagcgtagggctgttcctgatgcaggagggcgccacccccagcgctgcgctggacatgaccgcgcgcaacatggaacctagcatgtatgccgccaaccggccgttcatcaataagctgatggactacctgcaccgcgcggcggccatgaactcggactactttaccaatgccattttgaacccgcactggctcccgccgccggggttctacacgggcgagtacgacatgcccgaccccaacgatgggttcctgtgggacgacgtggacagcgcggtgttctcaccgaccttgcaaaagcgccaggaggcggtgcggacgcccgcgagcgagggcgcggtgggtcggagcccctttcctagcttagggagtttgcatagcttgccgggctcggtgaacagcggcagggtgagccggccgcgcttgctgggcgaggacgagtacctgaacgactcgctgctgcagccgccgcgggtcaagaacgccatggccaataacgggatagagagtctggtggacaaactgaaccgctggaagacctacgctcaggaccatagggagcctgcgcccgcgccgcggcgccagcgccacgaccggcagcggggcctggtgtgggacgacgaggactcggccgacgatagcagcgtgttggacttgggcgggagcggtggggccaacccgttcgcgcatctgcagcccaaactggggaggcggatgttttgaaatgcaaaataaaactcaccaaggccatagcgtgcgttctcttccttgttagagatgaggcgtgcggtggtgtcttcctctcctcctccctcgtacgagagcgtgatggcgcaggcgaccctggaggttccgtttgtgcctccgcggtatatggctcctacggagggcagaaacagcattcgttactcggagctggctccgctgtacgacaccactcgcgtgtatttggtggacaacaagtcggcggacatcgcttccctgaactaccaaaacgaccacagcaacttcctgaccacggtggtgcagaacaacgatttcacccccgccgaggccagcacgcagacgataaattttgacgagcggtcgcggtggggcggtgatctgaagaccattctgcacaccaacatgcccaatgtgaacgagtacatgttcaccagcaagtttaaggcgcgggtgatggtggctagaaagcatcccaaagatgtagatgcaagtgatttaagcaaggatatcttagagtatgattggtttgagtttaccctgcccgagggcaacttttccgagaccatgaccatagacctgatgaacaacgccatcttggaaaactacttgcaagtggggcggcaaaatggcgtgctggagagcgatatcggagtcaagtttgacagcaggaatttcaagctgggctgggacccggtgaccaagctggtgatgccaggggtctacacctacgaggccttccacccggacgtggtgctgctgccgggctgcggggtggacttcaccgagagccgcctgagcaacctcctgggcattcgcaagaagcaacctttccaagagggcttcagaatcatgtatgaggatctagaaggcggtaacatccccgctctcctggataccaaaaaatatctggatagcaagaaagaaattgaagatgcaaaacagaaagcggcccaggcaggtggcgagatcagaggagacagtgctgatactagagctgcagaacaggcgactgaaaaagagctggttattgaacccatcgagcaagatgaaagcaagagaagctataatgtgatcaagggtacccatgacaccctgtaccgaagttggtacctgtcctatacctacggggaccccgagaagggggtgcagtcgtggacgctgctcaccaccccggacgtcacctgcggcgcggagcaagtctactggtcgctgccggacctcatgcaagaccccgtcaccttccgttctacccagcaagtcagcaactaccccgtggtcggcgccgagctcatgcccttccgcgccaagagcttttacaacgacctcgccgtctactcccagctcatccgcagctatacctccctcacctacgtcttcaaccgcttccccgacaaccagatcctatgccgcccgcccgcgcccaccatcaccaccgtcagtgaaaacgtgcctgctctcacagatcacgggacgcttccgctgcgcagcagtatccgcggagtccagcgagtgaccgtcactgacgcccgtcgccgcacctgtccctacgtctacaaggccctgggcatagtcgcgccgcgcgtgctctccagtcgcaccttctaaaaaatgtctattctcatctcacccagcaataacaccggctggggtcttactaggcccagcaccatgtacggaggagccaagaagcgctcccagcagcaccccgtccgcgtccgcggccacttccgcgctccctggggagcttacaagcgggggcggacttccaccgccgccgtgcgcaccactgtcgacgacgtcatcgactcggtggtcgccgacgcgcgcaactatacccccgccccctccaccgtggacgcggtcatcgacagcgtggtggccgacgcgcgcgactatgccagacgcaagagccggcggcgacggatcgccaggcgccacaggagcacgcccgccatgcgcgccgcccgagctctgctgcgccgcgccagacgcacgggtcgccgggccatgatgcgagccgcgcgccgcgccgccactgcaccccccgcaggcaggactcgcagacgagcggccgccgccgccgccgcggccatttctaacatgaccagacccaggcgcggaaacgtgtactgggtacgcgactccgtcacgggcgtgcgcgtgcccgtgcgcacccgtcctcctcgtccctgatctaatgcttgtgtcctcccccccgcaagcgacgatgtcaaagcgcaaaatcaaggaggagatgctccaggtcgtcgccccggagatttatggaccaccccaggcggaccagaaaccccgcaaaatcaagcgggttaaaaaaaaggatgaggtggacgagggggcagtagagtttgtgcgcgagttcgctccgcggcggcgcgtaaattggaaggggcgcagggtgcagcgcgtgttgcggcccggcacggcggtggtgttcacgcccggcgagcggtcctcggtcaggagcaagcgtagctatgacgaggtgtacggcgacgacgacatcctggaccaggcggcggagcgggcgggcgagttcgcctacgggaagcggtcgcgcgaagaggagctcatctcgctgccgctggacgagagcaaccccacgccgagcctgaagcccgtgaccctgcagcaggtgctgccccaggcggtgctgctgccgagccgcggggtcaagcgcgagggcgagaacatgtacccgaccatgcagatcatggtgcccaagcgccggcgcgtggaggacgtgctggacaccgtgaaaatggatgtggagcccgaggtcaaggtgcgccccatcaagcaggtggcgccgggcctgggcgtgcagaccgtggacattcagatccccaccgacatggatgtcgacaaaaaaccctcgaccagcatcgaggtgcagaccgacccctggctcccagcctccaccgctaccgtctccacttctaccgccgccacggctaccgagcctcccaggaggcgaagatggggcgccgccagccggctgatgcccaactacgtgttgcatccttccattatcccgacgcctggctaccgcggcacccggtactacgccagccgcaggcgcccagccaccaagcgccgccgccgcaccacccgccgccgtctggccccagcccgcgtgcgccgcgtaaccacgcgccggggccgctcgctcgttctgcccaccgtgcgctaccaccccagcatcctttaatccgtgtgctgtgatactgttgcagagagatggctctcacttgccgcctgcgcatccccgtcccgaattaccgaggaagatcccgccgcaggagaggcatggcaggcagcggcctgaaccgccgccggcggcgggccatgcgcaggcgcctgagtggcggctttctgcccgcgctcatccccataatcgccgcggccatcggcacgatccctggcatagcttccgttgcgctgcaggcgtcgcagcgccgttgatgtgcgaataaagcctctttagactctgacacacctggtcctgtatatttttagaatggaagacatcaattttgcgtccctggctccgcggcacggcacgcggccgttcatgggcacctggaacgagatcggcaccagccagctgaacgggggcgccttcaattggagcagtgtctggagcgggcttaaaaatttcggctcgacgctccggacctatgggaacaaggcctggaatagtagcacggggcagttgttgagggaaaagctcaaagaccagaacttccagcagaaggtggtggacgggctggcctcgggcattaacggggtggtggacatcgcgaaccaggccgtgcagcgcgagataaacagccgtctggacccgcggccgcccacggtggtggagatggaagatgcaactcttccgccgcccaagggcgagaagcgcccgcggcccgacgcggaggagacgatcctgcaggtggacgagccgccctcgtacgaggaggccgtgaaggccggcatgcccaccacgcgcatcatcgcgccgctggccacgggtgtaatgaaacccgccacccttgacctgcctccaccacccacgcccgctccaccgaaggcagctccggttgtgcagccccctccggtggcgaccgccgtgcgccgcgtccccgcccgccgccaggcccagaactggcagagcacgctgcacagtatcgtgggcctgggagtgaaaagtctgaagcgccgccgatgctattgagagagaggaaagaggacactaaagggagagcttaacttgtatgtgccttaccgccagagaacgcgcgaagatggccaccccctcgatgatgccgcagtgggcgtacatgcacatcgccgggcaggacgcctcggagtacctgagcccgggtctggtgcagtttgcccgcgccaccgacacgtacttcagcctgggcaacaagtttaggaaccccacggtggccccgacccacgatgtgaccacggaccggtcccagcgtctgacgctgcgcttcgtgcccgtggatcgcgaggacaccacgtactcgtacaaggcgcgcttcactctggccgtgggcgacaaccgggtgctagacatggccagcacttactttgacatccgcggcgtcctcgaccgcggtcccagcttcaaaccctactcgggcacggcttacaacagcctggcccccaagggcgcccccaattccagtcagtgggaacagaaaaaggccactgggggagctgatgcaaaggaaacacatacattcggtgtagccgctatgggaggattgaacattacagacaaaggtttgcaaattggaatagatgaagataatgtagatggagatgatgagatatatgctgacaaaacttttcaaccagaacctcaagtgggagaggaaaactggaaagaaagttttaatttctatggaggcagagctattaagaaagacaccaaaatgaagccatgctatggttcctatgccagacccaccaatgttaagggaggtcaggctaaacttaaaactggagaagatatagaccctaacaaggactttgacatagacatggctttctttgatctaaagcaagctgacacaggaggtaataacaatcaagcagacgtggttatgtataccgaaaatattcatctggaaactccagacactcatgtggtgtacaagccaggcaaggaagatgcaagttctgaaattaacttgactcagcagtccatggccaacagacccaactacattggcttcagagacaactttgtagggctcatgtactacaacagcactggcaacatgggtgtgctggccggtcaggcatctcagttgaatgcagtggtcgacttgcaagacagaaacaccgagctgtcttaccagctcttgctagattctctgggcgacagaaccagatactttagcatgtggaactctgctgtggacagctatgatcccgatgtcaggatcattgagaatcacggtgtggaagatgaacttccaaactattgcttcccattggacggatctggcagcagtactgcttttcagggagttaaagtaaaaaccccggctggtactggtcaaaacactgtatgggaagttaacaatgatgctgcaacgcataaccaaattgcaagaggcgacctgtacgccatggagatcaacctccaggccaacctgtggaagagttttctgtactcgaacgtggccctgtacctgcccgactcctacaagtacactccggccaatgtcacgctgcccaccaacaccaacacctacgagtacatgaacggccgcgtggtggccccctcgctggtggacgcctacatcaacatcggcgcccgctggtcgctggaccccatggacaacgtcaaccccttcaaccaccaccgcaacgcgggcctgcgctaccgctccatgcttctgggcaacggccgctacgtgcccttccacatccaagtgccccaaaagttctttgccatcaagaacctgctcctgctcccgggctcctacacctacgagtggaacttccgcaaggatgtcaacatgatcctgcagagttccctcggcaacgacctgcgcgtcgacggcgcctccgtccgcttcgacagcgtcaacctctacgccaccttcttccccatggcacacaacaccgcctccaccctggaagccatgctgcgcaacgacaccaacgaccagtccttcaacgactacctctcggccgccaacatgctctaccccatcccggccaaggccaccaacgtgcccatctccatcccctcgcgcaactgggccgccttccgcggctggagtttcacccggctcaagaccaaggaaactccctccctcggctcgggtttcgacccctactttgtatactcgggctccatcccctaccttgacgggaccttctacctcaaccacaccttcaagaaggtctccatcatgttcgactcctcggtcagctggccaggcaacgaccggctgctcacgccgaacgagttcgagatcaagcgcagcgtcgacggggagggctacaacgtggcccaatgcaacatgaccaaggactggttcctcgtccagatgctctcccactacaacatcggttaccagggcttccatgtgcccgagggctacaaggaccgcatgtactccttcttccgcaacttccagcccatgagcaggcaggtggtcgatgagatcaactacaaggactacaaggccgtcaccctgcccttccagcacaacaactcgggcttcaccggctacctcgcgcccaccatgcgccaggggcagccctaccccgccaacttcccctacccgctcatcggctccaccgccgtgccctccgtcacccagaaaaagttcctctgcgacagggtcatgtggcgcatccccttctccagcaacttcatgtccatgggcgccctcaccgacctgggtcagaacatgctctatgccaactcggcccacgcgctcgacatgaccttcgaggtggaccccatggatgagcccaccctcctctatcttctcttcgaagttttcgacgtggtcagagtgcaccagccgcaccgcggcgtcatcgaggccgtctacctgcgcacgcccttctccgccggcaacgccaccacataagcatgagcggctccagcgaaagagagctcgcggccatcgtgcgcgacctgggctgcgggccctactttttgggcacccacgacaagcgcttccctggcttcctcgccggcgacaagctggcctgcgccatcgtcaacacggccggccgcgagaccggaggcgtgcattggctcgccttcggctggaacccgcgctcgcgcacctgctacatgttcgacccctttgggttctcggaccgccggctcaagcagatttacagcttcgagtacgaggccatgctgcgccgcagcgccctggcctcctcgcccgaccgctgtctcagcctcgagcagtccacccagaccgtgcaggggcccgactccgccgcctgcggacttttctgttgcatgttcttgcatgccttcgtgcactggcccgaccgacccatggacggaaaccccaccatgaacttgctgacgggggtgcccaacggcatgctacaatcgccacaggtgctgcccaccctgaggcgcaaccaggaggagctctaccgcttcctagcgcgccactccccttactttcgatcccaccgcgccgccatcgaacacgccaccgcttttgataaaatgaaacaactgcgtgtatctcaataaacagcactttattttacatgcactggagtatatgcaagttatttaaaagtcgaaggggttctcgcgctcgtcgttgtgcgccgcgctggggagggccacgttgcggtactggtacttgggctgccacttgaactcggggatcaccagtttgggcactggggtctcggggaaggtctcgctccacatgcgccggctcatctgcagggcgcccagtatgtcaggcgcggagatcttgaaatcgcagttgggaccggtgctctgcgcgcgcgagttgcggtacacggggttgcagcactggaacaccatcagactggggtgcttcacgctggccagcacgctcttgtcgctgatctgatccttgtccaggtcctcggcgttgctcaggccgaacggtgtcatcttgcacagctggcggcccaggaagggcacgctctgaggcttgtggttacactcgcagtgcactggcatcagcatcatccccgagccgcgctgcatattcgggtagagggccttgacaaaggccaagatctgcttgaaagcttgctgggccttggccccctcgctgaagaacaggccgcagctcttcccgctgaactggttatttccacacccggcatcatgcacgcagcagcgcgcgtcatggctggtcagttgcaccacgctccgtccccagcggttctgggtcaccttggccttgctgggctgctccttcaacgcacgctggccgttctcgctggtcacatccatctccaccacgtgatccttgtggatcatcaccgttccatgcaggcacttgagctggccttccacctcggtgcagccgtgatcccacagggcgcagccggtgcattcccaattcttgtgcgcgatcccgctgtggctgaatatgtaaccttgcaacatgcggcccatcacggtgctaaatgatttactggtgctgaaggtcagttgcaggccgcgggcctcctcgttcatccaggtctggcacatcttttggaagatctcggtctgctcgggcatgagcttgtaagcatcgcgcaggccgctgtcgacgcgatagcgttccatcagcacgttcatggtatccatgcccttctcccaggacgagaccagaggcagactcagggggttgcgcacgttcaggacaccgggggtcgcgggctctacgatgcgttttccgtcctttccttccttcaacaggaccggcggctggctgaatcccactcccacgatcacggcttcttcctggggcatctcttcgtcggggtccgtcttggtcacatgcttggtctttctggcttgcttcttttttggagggctgtccacggggaccacgtcctcctcggaagacccggagcccacccgctgatactttcggcgcttggtgggcagaggaggtggcggcgaggggctcctctcctgctccggcggatagcgcgctgaaccgtggccccggggcggagtggcctctcggtccatgaaccggcgcacgtcctgactgccgccggccattgtttcctaggggaagatggaggagcagccgcgtaagcaggagcaggaggaggagaacttaaccacccacgaacaagcaaaaatcgagcaggacctgggcttcgaagagccggctcgtctagaacccccacaggatgaacaggagcacgagcaagacgcaggccaggaggagaccgacgctgggctcgagcatggctacctagaggaggacatgctgctgaaacacttgcagcgccaatccctcatcctcagggacgccctggccgaccggagcgagacccccctcagcgtcgaggagctaagtagggcctacgagctcaaccttttctcgccgcgcgtgccccccaaacgccagcccaacggcacctgcgagcccaacccgcgcctcaacttttaccccgttttcgcggtccccgaggccctggccacctatcacatctttttcaagaaccaaaagatccccgtctcctgtcgcgccaaccgcacccgcgccgacgcgctcctcgctctggggcccggcgcgcgcatacctgatatcgcttccctggaagaggtgcccaagatcttcgaagggctcggtcgggacgagacgcgcgcggcgaacgctctgaaagaaacagcagaggaagagggtcaaactagcgccctggtagagttggaaggcgacaacgccaggctggccgtactcaagcgcagcgtcgagctcacccacttcgcctaccccgccgttaacctcccgcccaaggtcatgcgtcgcatcatggatcagctcatcatgccccacatcgaggccctcgatgagacgcaagagcagcggcccgaggacgcccagcccgtggtcagcgacgagcagctcgcgcgctggctcgaaaaccgcgacccccaggtcctggagcagcggcgcaagctcatgctggccgtggtccttgttaccctcgagctggaatgcatgcgccgcttcttcagcgaccccgacaccctgcgcaaggtcgaggagacactgcactacactttcaggcacggctttgtcaggcaggcctgcaagatctccaacgttgagctgaccaacctggtctcctgcctggggatcctgcacgagaaccgcctggggcagaccgtgcttcactctaccctcaagggagaggcgcgtcgggactacatccgcgactgcgtctttctctttctttgccacacctggcagtcggccatgggagtgtggcagcagtgtctagaggacgagaacctgaaggagctggacaagcttcttgctagaaacctcaaaaagctgtggacgggcttcgacgagcgcaccgtcgcctcggacctggccgaaatagtcttccccgagcgcctgaggcagacgctgaaaggcgggctgcccgacttcatgagccaaagcatgttgcaaaactaccgcactttcattctcgagcgatcggggatcctgcccgccacctgcaacgccttcccctccgactttgtcccgctgagctaccgcgagtgtcccccgccgctgtggagccactgctacctcttgcagctggccaactacatcgcccaccactcggatgtgatcgaggacgtgagcggcgaggggctgctagagtgccactgccgctgcaacctgtgctccccgcaccgctccctggtctgcaacccacagctcctcagcgagacccaggtcatcggtaccttcgagctgcaaggtccggagaagtccaccgctccgctgaaactcacgccggggttgtggacttccgcgtacctgcgcaaatttgtacccgctgactaccacgcccatgagataaagttcttcgaggaccaatcgcgtccgcagcacgcggatctcacggcctgcgtcatcacccagggcgcgatcctcgcccaattgcacgccatccaaaaatcccgccaagagtttcttctgaaaaagggtagaggggtctacctggacccccagacgggcgaggtgctcaacccgggtctcccccagcatgccgaggaagaagcaggagccgctagtggaggagatggaagaagaatgggacagccaggcagaggaggacgaatgggaggaggagacagaggaggaagaattggaagaggtggaagaggagcaggcaacagagcagcccgtcgccgcaccatccgcgccggcagccccggcggtcacggatacaacctccgctccggtcaagcctcctcgtagatgggatcgagtgaagggtgacggtaagcacgagcggcagggctaccgatcatggaggacccacaaagccgcgatcatcgcctgcttgcaagactgcggggggaacatcgctttcgcccgccgctacctgctcttccaccgcggggtgaacatcccccgcaacgtgttgcattactaccgtcaccttcacagctaagaaaaaatcagaagtaagaggagtcgccggaggaggcctgaggatcgcggcgaacgagcccttgaccaccagggagctgaggaaccggatcttccccactctttatgccatttttcagcagagtcgaggtcagcagcaagagctcaaagtaaaaaaccggtctctgcgctcgctcacccgcagttgcttgtaccacaaaaacgaagatcagctgcagcgcactctcgaagacgccgaggctctgttccacaagtactgcgcgctcactcttaaagactaaggcgcgcccacccggaaaaaaggcgggaattacctcatcgccaccatgagcaaggagattcccaccccttacatgtggagctatcagccccagatgggcctggccgcgggcgcctcccaggactactccacccgcatgaattggctaagtgccggcccctcgatgatctcacgggtcaacggggtccgtaaccatcgaaaccagatattgttggagcaggcggcggtcacctccacgcccagggcaaagctcaacccgcgtaattggccctccaccctggtgtatcaggaaatccccgggccgactaccgtactacttccgcgtgacgcactggccgaagtccgcatgactaactcaggtgtccagctggccggcggcgcttcccggtgcccgttccgcccacaaccgggtataaaaaccctggtgatccgaggcagaggcacacagctcaacgacgagttggtgagctcttcgatcggtctgcgaccggacggagtgttccaactagccggagctgggagatcctccttcactcccaaccaggcctacctgaccttgcagagcagctcttcggagcctcgctccggaggcatcggaaccctccagtttgtggaggagtttgtgccctcggtctacttcaaccccttctcgggatcgccaggcctctacccggacgagttcataccgaacttcgacgcagtgagagaatcggtggacggctacgactgaatgtcccatggtgactcggctgagctcgctcggttgaggcatctggaccactgccgccgcctgcgctgcttcgcccgggagagctgcggcctcatctactttgagtttcccgaggagcaccccaacggccctgcacacggagtgcggatcaccgtagagggcaccaccgagtctcacctggtcaggttcttcacccagcaacccttcctggtcgagcgggaccggggcgccaccacctacaccgtctactgcatctgtcctaccccgaagttgcatgagaatttttgctgtactctttgtggtgagtttaataaaagctgaactaagaacctactttggaatcccttgtcgtcatcctcggaacaagaccgtcttctttaccaaccagaccaaggttcgtctgaactgtacaaccaacaggaagtaccttctctggactttccaagacacctcactcgctgttgtcaatacccgtgacaacgacggtgttttaatccccaacaacctcaccagtggacttactttctctaccaacaaaacaaagctcatccttcaccacccttttgtagagggaacctaccagtgccgacacggaccttgtgttcacaacttccatttggtgaaccttaccagcagcagcacagttgctcctgaaactaacctttcttctgatactaacaaacctcgtgtcggaggtgagctttgggttccatctctaacagagggtgggagttctattgaagtggttgggtatttgattttaggggtggtccttggtgggtgcatagcagtgctgtatcaacttccttgctgggtcgaaatcagggtatttatctgctgggtcagacattgtggggaggaaccatgaaggggctcttgctgattatcctttccctggtggggggtgtactgtcatgccacgaacagccacgatgtaacatcaccacaggcaatgagagaagcgaatgctctgtagttatcaaatgtgagcacaaatgttctctcaacattacattcaagaataagaccatgggacatgtatgggtgggcttctggcaaccaggagatgagcagaactacacggtcactgtccatggtagcgatggcaatcacactttcggtttcaaattcatttttgaagtcatgtgtgatatcacactgcatgtggctagacttcatggcttgtggccccctaccaaggagaacatggtgggtttttctttggcttttgtgatcatggcctgcttgatgtcaggtctgctggtaggggctctagtgtggttcctaaagcgcaagcccaggtacggaaatgaagagaaggaaaaattgctataaattctttttcttttcacagcaccatgaatactttgaccagtgtcgtgctgctctctcttcttgtggttcttagtcagggacaaatagaacatgaaaaacagagtgttcagtggggaaagaacataacgcttgtgggtcctaatgataaacctgttgaatggcacggacctagagatcaactttgtaagggaaaacaaatcttacacccagaattcaatcacacatgtaatgaacaaaacctcacactactttttgtgaataacactttccagggaatatattatggcattagaaatgatggtagaggtatgaaacaaattcaactaacagttgttgcacctcctgcctccacacgaaaacctttgtcaaagccaaaacaagtgaatgtccaatatggacataatgtaacattagaaggtcctccaggaatacctattgactggctcggaccaactaatcagctttgtaaaggaaaagaaattttacacccagaaataaaccatacctgtaatgttcaaaatttaacacttttatttgtaaactatactcaccgtggagcatattttggctttaacaaagacggaactgacagacatcactatgaggttactattctagatgggttcacaaatgcagggcagacaaaagaagagtcagtcagtgacaaatcaaaaggaaaaacttcttcaaaagagaaaaaaactcaaaaaaataactctcagagaaatgatgatgttaaagagttagattttcccagtggatctaatcaaactttagttggcccccctggatcaaaagttgattggtacacaacaaaaaatggtgactttacaaaattgtgtgatggattaaatggaccaaaaaatctgtgtaattatcagaacttaacattgcgaaatgtaagcagacaggacgaaggaacttattttgggtctaacgaacagtcaaagcattacagagttactgtctatacaaaacctagaaatcaaactaagagaatccagccatatactactaaaggaactacaaaatcaaccttaggtaatcacagctttgaattgcaactggcagatgatcaatctaatcaacaggatcaacaaattccatcaactactgtggcaatcgtggtgggagtgattgcgggctttataactataatcattgtcattctgtgctacatctgctgccgcaagcgtcccaggtcatacaatcatatggtagacccactactcagcttctcttactgaaactcagtcactctcatttcagaaccatgaaggctttcacagcttgcgttctgattagcatagtcacacttagtgcagctgctggtaaatgctatcatacagttaatgtcactaggggagggaatattacacttacaggggcaggaatcaacactacatggacagcttatcataacgatggaaaggggcaaaatggttggttgcccatctgtacatggggcgatcccatctatgtgtgccatggaaatagcagtactatttccaatcttacagttgtagctcacaaaaatctaactgacagaactattaaggcatatagctatgagaacaaagatgattatgaaacagtaaattcatgcttttatgttgtaaaagttgttgagcttccaaccactaaagcgcccacacagtctactacacatccaaccaccacagccagtacaactactgagaccactactcaaactacacagctagacactacagtgcagaatagtactgtgttggttaggtatttgttaagggaggaaagtactactgaacagacagaggctacctcaagtgccttcagcagcactgcaaatttaacttcgcttgcttcggtaaatgagacgatcgtgccgatgatgtatggccaacattacccaggtttggatatacaaattactttcctgattgtctgtggggtctttatcctcgctgtccttctctactttgtctgctgcaaggccagagaaaaatctaggcggcccatctacaggccagtaatcggggaacctcagccactccaagtggatggaggcttaaggaatcttctcttctcttttacagtatggtgatcagccatgattcctaggttcttcctatttaacatcctcttctgtctcttcaacatctgcgctgccttcgcagccgtctcgcacgcctcacccgactgtctcgggcccttccccacctacctcctctttgccctgctcacctgcacctgcgtctgcagcattgtctgcgtggtcatcaccttcctgcagctcatcgactggtgctgcgcgcgctacaattacctacaccacagtcccgaatacagggacgaaaacgtagccagaatcttaaggctcatatgaccatgcagactctgctcatactgctatccattctatcccctgccctagctgatgattactctaagtgcaaattcgcggacatatggaatttcttagactgctatcaggagaaaatggatatgccttcctattacttggcgattgttggggtagtcatggtctgctcctgcactttctttgccattatgatctacccatgttttaatctcggctggaactctgttgaggcattcacatacacactagaaagcagttcactagcctccacaccaccactcacaccgcctccccgcagaaatcagttccccatgattcagtacttagaagagccccctccccgacccccttccactgttagctactttcacataactggcggcgatgactgaccacctggacctcgagatggacggccaggcctccgagcagcgcatcctgcaactgcgcgtccgacagcagcaggagcgggccgccaaggagctcctcgatgccatcaacatccaccagtgcaagaagggcatcttctgcctggtcaaacaggcaaagatcacctacgagctcgtgtccggcggcaagcagcatcgcctcacctatgagatgccccagcagaagcagaaattcacctgcatggtgggcgtcaaccccatagtcatcacccagcagtcgggcgagaccaacggctgcatccactgctcctgcgaaagccccgagtgcatctactccctcctcaagaccctttgcggactccgcgacctcctccccatgaactgatattgattaaaagcccaaaaaccaatcagacccttcccccatttccccatccccaaactactcataacaataaatcattggaactaatcattcaataaagatcacttacttgaaatctgaaagtatgtctctggtgtagttgttgagcagcacctcggtaccctcctcccagctctggtactccagtccccggcgggcggcgaacttcctccacaccttgaaagggatgtcaaattcctggtccacaattttcattgtcttccctctcagatgtcaaagaggctccgggtggaagatgacttcaaccccgtctacccctatggctacgcgcggaatcagaatatccccttcctcactcccccctttgtctcctccgatggattccaaaacttcccccctggtgtcctgtcactcaaactggctgacccaatcaccatcgccaatgggaatgtttcactcaaggtgggagggggactcactctggaacaagatagtggaaagctaattgtgaatcctaaggctcccttgcaagttgcaaatgacaaattagagctttcttacgcagatccatttgaaactagtgctaataaacttagtttaaaagtagggcatggactaaaagtgttggatgagaaaaatgctggaggattgaaagatttaattggcacacttgtagttttaactggaaaaggaataggcgttgaagagttaaaaaacgctgataatactaataggggagttggaattaatgtaagactgggtaaagatggaggtttgtcctttgataaaaaaggcgacttagtagcttggaataagcatgatgacagacgcactttatggacaactccagacccatctccaaattgtacaattgatgaggaaagagattcaaagctcactttagtgttaacaaaatgcggtagtcaaattttggccaatgtctctttacttgttgtaaaaggaaaatttagtaacataaacaataatactaatccaactgataaaaaaatcacagtgaagctactttttaatgaaaagggagtattaatggacagttcgtcacttaaaaaagaatattggaactacagaaatgataattctactgtatctcaggcctatgataatgcagttccttttatgccaaacataaaagcttatcctaaacctaccacagacacttcagctaaaccagaagataaaaaaagtgctgctaaaagatacattgtgagcaatgtctatattggaggcttgccagataaaactgttgttataactattaagttgaatgcagaaactgaatctgcttattcaatgacctttgaatttacatgggcaaaaacatttgaaaatttgcagtttgattcctcctcttttaccttctcctatattgctcaagaaaatgaggacgaagacaaataaaatgttttaaaatgaattcatgtatctttattgatttttacaccagcacgggtagtcagtctcccaccaccagcccatttcacagtgtaaacaattctctcagcacgggtggccttaaatagggaaatgttctgattagtgcgggaactggacttggggtctataatccacacagtttcctggcgagccaaacgggggtcggtgattgagatgaagccgtcctctgaaaagtcatccaagcgggcctcacagtccaaggtcacagtctggtggaacgagaagaacgcacagattcatactcggaaaacaggatgggtctgtgcctctccatcagcgccctcagcagtctctgccgccggggctcggtgcggctgctgcagatgggatcgggatcgcaagtctctctgactataatcccaacagccttcagcatcagtctcctggtgcgtcgggcacagcaccgcatcctgatctctgccatgttctcacagtaagtgcagcacataatcaccatgttattcagcagcccataattcagggcgctccagccaaagctcatgttggggatgatggaacccacgtgaccatcgtaccagatgcggcagtatatcaggtgcctgcccctcatgaacacactgcccatatacatgatctctttgggcatgtctctgttcacaatctggcggtaccatgggaagcgctggttgaacatgcacccgtaaatgactctcctgaaccacacggccagcagggtgcctcccgcccgacactgcagggagcccggggatgaacagtggcaatgcaggatccagcgctcgtacccgctcaccatctgagctctcaccaagtccagggtagcggggcacaggcacactgacatacatctttttaaaatttttatttcctctggggtcaggatcatatcccaggggactggaaactcttggagcagggtaaagccagcagcacatggtaatccacggacagaacttacattatgataatctgcatgatcacaatcgggcaacaggggatgttgttcagtcagagaggccctggtctcctcatcagatcgtggtaaacgggccctgcgatatggatgatggcgcagcgagctggattgaatctcggtttgcattgtagtggattctcttgcgtaccttgtcgtacttctgccagcagaaatgggcccttgaacagcagatacccctcctgcggccgtcctttcgctgctgccgctcagtcatccaactgaagtacatccattctcgaagattctggagaagttcctctgcatctgatgaaacaaaaaacccgtccatgcgaattcccctcatcacatcagccaggactctgtaggccatccccatccagttaatgctgccttgtctatcattcagagggggcggtggcaggattggaagaaccatttttattccaagcggtctcgaaggacgataaagtgcaagtcacgcaggtgacagcgttccccgccgctgtgctggtggaaacagacagccaggtcaaaacccactctattttcaaggtgctcgactgtagcttcgagcagtggctctacgcgtacatccagcataagaatcacattaaaggctgggcctccatcgatttcatcaatcatcaggttacactcattcaccattcccaggtaattctcatttttccagccttgaattatttctacaaattgttggtgtaagtccactccgcacatgtggaaaagttcccacagcgccccctccactttcataatcaggcagaccttcatattagaaacagatcctgctgctccaccacctgcagcgtgttcaaaacaacaagattcaatgaggttctgccctctgccctcagctcacgtctcagcgtcagctgcaaaaagtcactcaagtcctcagccactacagctgacaattcagagccagggctaagcgtgggactggcaagcgtgagtgagtactttaatgctccaaagctagcgcccaaaaactgcatgctggaataagctctctttgtgtcaccggtgatgccttccaagaggtgagtgataaagcgaggtagtttttctttaatcatttgagtaatagaaaagtcctctaaataagtcactaggaccccaggaaccacaatgtggtagctgacagcgtgtcgctcaagcatggttagtagagatgagagtctgaaaaacagaaagcatgcactaaaccagagtggcaagtctcactgaaggaaaaatcactctctccagcaacagtgtgcccactgggtggccctcgcggacatacaaaaatcggtccgtgtggttaaagagcagcacagttagctcatgtcttctcccggcaaaaatcacatcggactgggttagtatgcccctggcatggtagtcatttaaggccaaaaatctgccttggtagccagtaggaattagcacgctcactcttaggtgaaccaaaaccaccccatgcggaggaatgtgaaaagattcggggcaaaagaaattatatctattgctaaacccttcctgaacgggagcgatccctccagggctatctataaaagcatacagagattcagccatagctcagcccgcttaccagtaaacatagagcacagcagtacaagcgccaacagcagcgactaactagccactaacccagctccctatttaaaggcaccttacactgacgtaattaccaaaggtctaaaaaccccgccaaaaaaaacacacacgccctgggtgtttttcgcgaaaacacttccgcgttctcacttcctcgtatcgatttcgtgactcaacctccggattcccacgttacgtcacttctgcccttacatgtaacttatccgtagggcgccatcttgcccacgtccaaaatggcttccatgtccagccacgcctccgcggcgaccgtcagccgtgcgtcgtgacgtcatttgcatcaccgcttctcggccaatcagcattggctccgccccaaaaccgttaaaattcaaaagctcatttgcatattaacttttgtttactttgtggggtatattattgatgatg

SEQ ID NO: 29 - DNA, 35215 bp, Adenovirus D37
  MISC_FEATURE (1)..(35215): Complete Genome
atcatcaataatataccccacaaagtaaacaaaagttaatatgcaaatgagcttttgaattttaacggttttggggcggagccaacgctgattggacgagaagcggtgatgcaaataacgtcacgacgcacggctaacggccggcgcggaggcgtggcctaggccggaagcaagtcgcggggctaatgacgtataaaaaagcggactttagacccggaaacggccgattttcccgcggccacgcccggatatgaggtaattctgggcggatgcaagtgaaattaggtcattttggcgccaaaactgaatgaggaagtgaaaagtgaaaaatacctgtcccgcccagggcggaatatttaccgagggccgagagactttgaccgattacgtggggtttcgattgcggtgtttttttcgcgaatttccgcgtccgtgtgaaagtccggtgtttatgtcacagatcagctgatccacagggtatttaaaccagttgagcccgtcaagaggccactcttgagtgccagcgagtagagatttctctgagctccgctcccaaagtgtgagaaaaatgagacacctgcgcctcctgtcttcaactgtgcctattaacatggccgcattattgctggaggactatgtgagtacagtattggaggacgaactacatccatctccatttgagctgggacctacacttcaggacctttatgatttggaggtagatgcccatgatgacgacccaaacgaagaggctgtgaatttaatatttccagaatctctgattcttcaggctgacatagccagcgaagctgtacctacaccacttcatacaccgactttgtcacccatacctgaattggaagaggaggacgagttagacctccgatgttatgaggaaggttttcctcccagcgattcagaggacgaacagggtgagcagagcatggctctaatctcagaatatgcttgtgtggttgtggaagagcattttgtgttggacaatcctgaggtgcccgggcaaggctgtagatcctgccagtaccaccgggataagaccggagacacaaacgcctcctgcgctctgtgttacatgaaaaagaacttcagctttatttacagtaagtggagtgaatgtgagagaggctgagtgcttaacacataactgggtgatgcttaaacagctgtgctaagtgtggtttatttttgtttctaggtccggtgtcagaggatgagtcatcaccctcagaagaaaaccacccgtgtccccctgagctgtcaggcgaaacgcccctgcaagtgcacaaacccaccccagtcagacccagtggcgagaggcgagcagctgttgaaaaaattgaggacttgttacatgacatgggtggggatgaacctttggacctgagcttgaaacgccccaggaactaggcgcagctgtgcttagtcatgtgtaaataaagttgtacaataaaagtatatgtgacgcatgcaaggtgtggtttatgactcatgggcggggcttagtcctatataagtggcaacacctgggcactgggcacagaccttcagggagttcctgatggatgtgtggactatccttgcagactttagcaagacacgccggcttgtagaggatagttcagacgggtgctccgggttctggagacactggtttggaactcctctatctcgactggtgtacacagttaagaaggattataacgaggaatttgaaaatctttttgctgattgctctggcctgctagattctctgaatctcggccaccagtcccttttccaggaaagggtactccacagccttgatttttccagcccagggcgcactacagccggggttgcttttgtggtttttctggttgacaaatggagccagaacacccaactgagcaggggctacattctggacttcgcagccatgcacctgtggagggcatgggtgaggcagcggggacagagaatcttgaactactggcttatacagccagcagctccgggtcttcttcgtctacacagacaaacatccatgttggaggaagaaatgaggcaggccatggacgagaacccgaggagcggcctggaccctccgtcggaagaggagctggattgaatcaggtatccagcttgtacccagagcttagcaaggtgctgacatccatggctaggggagtgaagagggagaggagcgatgggggcaataccgggatgatgaccgagctgacggccagcctgatgaatcgcaagcgcccagagcgcattacctggcacgagctacagatggagtgcagggatgagttgggcctgatgcaggataaatatggcctggagcagataaaaacacattggttgaacccagatgaggattgggaggaggccattaagaaatatgccaagatagccctgcgcccagattgcaagtacatagtgaccaagaccgtgaatattagacatgcctgctacatttcagggaacggggcagaggtggtcatcgataccctggacaaggccgccttcaggtgttgcatgatgggaatgagagcaggagtgatgaatatgaattccatgatcttcatgaacatgaagttcaatggagagaagtttaatggggtgctgttcatggccaacagccacatgaccctgcatggctgcagtttctttggcttcaacaatatgtgcgccgaggtctggggcgcttccaagatcaggggatgtaagttttatggctgctggatgggcgtggtcggaagacctaagagcgagatgtctgtgaagcagtgtgtgtttgagaaatgctacctgggagtctctaccgagggcaatgctagagtgagacactgctcttccctggatacgggctgcttctgcctggtgaagggtacggcctctctgaagcataatatggtgaagggctgcacagatgagcgcatgtacaacatgctaacatgcgactcgggggtctgtcatatcctgaagaacatccatgtgacctcccaccccagaaagaagtggccagtgtttgagaataacctgctgatcaagtgccatatgcacctgggtgccagaaggggcaccttccagccgtaccagtgcaactttagccagaccaagctgctgttggaaaacgatgccttctccagggtgaacctgaacggcatctttgacatggatgtctcggtgtacaagatcctgagatacgatgagaccaagtccagggtgcgcgcttgcgagtgcgggggcagacacaccaggatgcagccagtggccctggatgtgaccgaggagctgagaccagaccacctggtgatggcctgtaccgggaccgagttcagctccagtggggaggacacagattagaggtaggtttgagtagtgggcgtggctaatgtgagtataaaggcgggtgtcttacgagggtctttttgcttttctgcagacatcatgaacgggaccggcggggccttcgaaggggggctttttagcccttatttgacaacccgcctgccgggatgggccggagttcgtcagaatgtgatgggatctacggtggatgggcgtccagtgcttccagcaaattcctcgaccatgacctacgcgaccgtggggagctcgtcgcttgacagcaccgccgcagccgcggcagccgcagccgccatgacagcgacgagactggcctcgagctatatgcccagcagcggtagcagcccctctgtgcccagttccatcatcgccgaggagaaactgctggccctgctggccgagctggaagccctgagccgccagctggccgccctgacccagcaggtgtccgatctccgcgagcaacagcagcagcaaaataaatgattcaataaacacagattctgattcaaacagcaaagcatctttattatttattttttcgcgcgcggtaggccctggtccacctctcccgatcattgagagtgcggtggattttttccaggacccggtagaggtgggattggatgttgaggtacatgggcatgagcccgtcccgggggtggaggtagcaccactgcatggcctcgtgctctggggtcgtgttgtagataatccagtcatagcaggggcgctgggcgtggtgctggatgatgtccttgaggaggagactgatggccacggggagccccttggtgtaggtgttggcaaagcggttaagctgggagggatgcatgcggggggagatgatgtgcagtttggcctggatcttgaggttggcgatgttgccacccagatcccgccgggggttcatattgtgcaggaccaccagaacggtgtagcccgtgcacttggggaacttatcatgcaacttggaagggaatgcgtggaagaatttggagacgcccttgtgcccgcccaggttttccatgcactcatccatgatgatggcaatgggcccgtgggctgcggctttggcaaaaacgtttctggggtcagagacatcataattatgctcctgggtgagatcatcataagacattttaatgaatttggggcgaagggtgccagattgggggacgatcgttccctcgggccccggggcgaagttcccctcgcagatctgcatctcccaggctttcatctcggagggggggatcatgtccacctgcggggcgatgaaaaaaacggtttccggggcgggggtgatgagctgcgaggagagcaggtttcttaacagctgggacttgccgcacccggtcgggccgtagatgaccccgatgacgggttgcaggtggtagttcaaggagatgcagctgccgtcgtcccggaggaggggggccacctcgttgagcatgtctctcacttggaggttttcccggacgagctcgccgaggaggcggtccccgcccagcgagagcagctcttgcagggaagcaaagtttttcaggggcttgagcccgtcggccatgggcatcttggcaagggtctgcgagaggagctccaggcggtcccatagctcggtgacgtgctctacggcatctcgatccagcagacttcctcgtttcgggggttgggacgactgcgactgtagggcacgagacgatgggcgtccagcgcggccagcgtcatgtccttccagggtctcagggtccgagtgagggtggtctccgtcacggtgaaggggtgggccccgggctgggcgcttgcaagggtgcgcttgagactcatcctgctggtgctgaaacgggcacggtcttcgccctgcgcgtcggcgagatagcagttgaccatgagcttgtagttaagggcctcggcggcgtggcccttggcacggagcttgcctttggaagagcgcccgcaggcgggacagaggagggattgcagggcgtagagcttgggtgcgagaaagacggactcgggagcgaaggcgtccgctccgcagtgggcgcagacggtttcgcactcgacgagccaggtgagctcgggctgctcggggtcaaaaaccagttttcccccgttctttttgatgcgcttcttacctcgcgtctccatgagtctgtgtccgcgttcggtgacaaacaggctgtctgtgtccccgtagacggacttgattggcctgtcctgcaggggcgtcccgcggtcctcctcgtagagaaactcggaccactctgagacaaaggcgcgcgtccacgccaagacaaaggaggccacgtgcgaggggtagcggtcgttgtccaccagggggtccaccttttccaccgtgtgcagacacatgtccccctcctccgcatccaagaaggtgattggcttgtaggtgtaggccacgtgaccgggggtccccgacgggggggtataaaagggggcgggtctgtgctcgtcctcactctcttccgcgtcgctgtccacgagcgccagctgttggggtaggtattccctctcgagagcgggcatgacctcggcactcaggttgtcagtttctagaaacgaggaggatttgatgttggcctgccctgccgcaatgctttttaggagactttcatccatctggtcagaaaagactatttttttattgtcaagcttggtggcaaaggagccatagagggcgttggagagaagcttggcgatggatctcatggtctgatttttgtcacggtcggcgcgctccttggccgcgatgttgagctggacatactcgcgcgcgacacacttccattctgggaagacggtggtgcgctcgtcgggcacgatcctgacgcgccagccgcgattatgcagggtgaccaggtccacgctggtggccacctcgccgcgcaggggctcgttggtccagcagaggcgtccgcccttgcgcgagcagaacgggggcagcacatcaagcagatgctcgtcaggggggtccgcatcgatggtgaagatgcccggacagagttccttgtcaaaataatcgatttttgaggatgcatcatccaaggccatctgccactcgcgggcggccagcgctcgctcgtaggggttgaggggcggaccccagggcatgggatgcgtgagggcggaggcgtacatgccgcagatgtcgtagacatagatgggctccgagaggatgccgatgtaggtgggataacagcgccccccgcggatgctggcgcgcacatagtcatacaactcgtgcgagggggccaagaaagcggggccgagattggtgcgctggggctgctcggcgcggaagacgatctggcgaaagatggcatgcgagttggaggagatggtgggccgttggaagatgttaaagtgggcgtggggcaagcggaccgagtcgcggatgaagtgcgcgtaggagtcttgcagcttggcaacgagctcggcggtgacaaggacgtccatggcgcagtagtccagcgtttcacggatgatgtcataacccgcctcttctttcttctcccacagcgcgcggttgagggcgtactcctcgtcatccttccagtactcccggagcgggaatcctcgatcgtccgcacggtaagagcccagcatgtagaaatggttcacggccttgtagggacagcagcccttctccacggggagggcgtaagcttgagcggccttgcggagcgaggtgtgcgtcagggcgaaggtatccctaaccatgactttcaagaactggtacttgaaatccgagtcgtcgcagccgccgtgctcccagagctcgaaatcggtgcgcttcttcgagagggggttaggcagagcgaaagtgacgtcattgaagagaatcttgcctgcccgcggcatgaaattgcgggtgatgcggaaagggcccggaacggaggctcggttgttgatgacctgggcggcgaggacgatctcgtcgaagccgttgatgttgtgcccgacgatgtagagttccatgaatcgcgggcggcctttgatgtgcggcagctttttgagttcctcgtaggtgaggtcctcggggcattgcaggccgtgctgctcgagcgcccactcctggagatgtgggttggcttgcatgaatgaagcccagagctcgcgggccatgagggtctggagctcgtcgcgaaagaggcggaactgctggcccacggccatcttttctggggtgacgcagtagaaggtgagggggtcccgctcccagcgatcccagcgtaagcgcacggcgagatcgcgagcgagggcgaccagctcggggtccccggagaatttcatgaccagcatgaaggggacgagctgcttgccgaaggaccccatccaggtgtaggtttctacatcgtaggtgacaaagagccgctccgtgcgaggatgagagccgattgggaagaactggatttcctgccaccagttggtcgagtggctgttgatgtgatgaaagtagaaatcccgccggcgaaccgagcactcgtgctgatgcttgtaaaagcgtccgcagtactcgcagcgctgcacgggctgtacctcatccacgagatacacagcgcgtcccttgaggaggaacttcaggagtggcggccctggctggtggttttcatgttcgcctgcgtgggactcaccctggggctcctcgaggacggagaggctgacgagcccgcgcgggagccaggtccagatctcggcgcggcgggggcggagagcgaaaacgagggcgcgcagttgggagctgtccatggtgtcgcggagatccaggtccgggggcagggttctgaggttgacctcgtagaggcgggtgagggcgtgcttgagatgcagatggtacttgatctccacgggtgagttggtggtcgtgtccacgcattgcatgagcccgtagctgcgcggggccacgaccgtgccgcggtgcgcttttagaagcggtgtcgcggacgcgctcccggcggcagcggcggttccggccccgcgggcagtggcggtagaggcacgtcggcgtggcgctcgggcaggtcccggtgctgcgccctgagagcgctggcgtgcgcgacgacgcggcggttgacatcctggatctgccgcctttgcgtgaagaccacgggccccgtgactttgaacctgaaagacagttcaacagaatcaatctcggcgtcattgacggcggcctgacgcaggatctcttgcacgtcgcccgagttgtcctggtaggcgatctcggacatgaactgctcgatttcctcctcctggagatcgccgcggcccgcgcgctctacggtggcggcaaggtcattcgagatgcgacccatgagctgcgagaaggcgcccaggccgctctcgttccagacgcggctgtaaaccacgtccccgtcggcgtcgcgcgcgcgcatgaccacctgcgcgaggttgagctccacgtgccgcgcgaagacggcatagttgcgcaggcgttggaagaggtagttgagggtggtggcgatgtgctcggtgacgaagaagtacataatccagcggcgcaggggcatttcgctgatgtcgccaatggcctccagcctttccatggcctcgtagaaatccacggcgaagttgaaaaactgggcgttgcgggccgagaccgtgagctcgtcttccaggagcctgatgagttcggcgatggtggcgcgcacctcgcgctcgaaatccccgggggcctcctcctcttcctcttcttccatgacgacctcttcttctatttcttcctctgggggcggtggtggtggcggggcccgacgacgacggcgacgcaccgggagacggtcgacgaagcgctcgatcatctccccgcggcggcgacgcatggtttcggtgacggcgcgaccccgttcgcgaggacgcagcgtgaagacgccgccggtcatctcccggtaatggggtgggtccccgttgggcagcgatagggcgctgacaatgcatcttatcaattgcggtgtagggcacgtgagcgcgtcgagatcgaccggatcggagaatctttcgaggaaagcgtctagccaatcgcagtcgcaaggtaagctcaaacacgtagcagccctgtggacgctgttagaattgcggttgctgatgatgtaattgaagtaggcgtttttgaggcggcggatggtggcgaggaggaccaggtccttgggtcccgcttgctggatgcggagccgctcggccatgccccaggcctggccctgacaccggctcaggttcttgtagtagtcatgcatgagcctctcgatgtcatcactggcggaggcggagtcttccatgcgggtgaccccgacgcccctgaacggctgcacgagcgccaggtcggcgacgacgcgctcggcgaggatggcctgttgcacgcgggtgagggtgtcctggaagtcgtccatgtcgacgaagcggtggtaggcccctgtgttgatggtgtaagtgcagttggccataagcgaccagttgacggtctgcaggccgggttgcacgacctcggagtacctgagccgcgagaaggcgcgcgagtcgaagacatagtcgttgcaggtgcgcacgaggtactggtatccgactagaaagtgcggcggcggctggcggtagagcggccagcgctgggtggccggcgcgcccggggccaggtcctcaagcatgagtcggtggtagccgtagaggtagcgggacatccaggtgatgccggcggcggtggtggaggcgcgcgggaactcgcggacgcggttccagatgttgcgcaggggcaggaaatagtccatggtcggcacggtctggccggtgagacgcgcgcagtcattgatgctctagaggcaaaaacgaaagcggttgagcgggctcttcctccgtagcctggcggaacgcaaacgggttaggccgcgtgtgtaccccggttcgagtcccctcgaatcaggctggagccgcgactaacgtggtattggcactcccgtctcgacccaagcccgatagccgccaggatacggcggagagccctttttgtcggccgaggggagtcgctagacttgaaagcggccgaaaaccctgccgggtagtggctcgcgcccgtagtctggagaagcatcgccagggttgagtcgcggcagaacccggttcaaggacggccgcggcgagcgggacttggtcaccccgccgatttaaagacccacagccagccgacttctccagttacgggagcgagcccccttttttctttttgccagatgcatcccgtcctgcgccaaatgcgtcccacccccccggcgaccaccgcgaccgcggccgtagcaggcgccggcgctagccagccacagccacagacagagatggacttggaagagggcgaagggctggcgagactgggggcgccgtccccggagcgacatccccgcgtgcagctgcagaaggacgtgcgcccggcgtacgtgcctgcgcagaacctgttcagggaccgcagcggggaggagcccgaggagatgcgcgactgccggtttcgggcgggcagggagctgcgcgagggcctggaccgccagcgcgtgctgcgcgacgaggatttcgagccgaacgagcagacggggatcagccccgcgcgcgcgcacgtggcggcggccaacctggtgacggcctacgagcagacggtgaagcaggagcgcaacttccaaaagagtttcaacaaccacgtgcgcaccctgatcgcgcgcgaggaggtggccctgggcctgatgcacctgtgggacctggcggaggccatcgtgcagaacccggacagcaagcctctgacggcacagctgttcctggtggtgcagcacagcagggacaacgaggcgttcagggaggcactgctgaacatcgccgagcccgagggtcgctggctgctggagctgattaacatcttgcagagcatcgtagtgcaggagcgcagcctgagcctggccgagaaggtggcggcgatcaactactcggtgctgagcctgggcaagttttacgcgcgcaagatttacaagacgccgtatgtgcccatagacaaggaggtgaagatagacagcttttacatgcgcatggcgctcaaggtgctgacgctgagcgacgacctgggcgtgtaccgcaacgaccgcatccacaaggccgtgagcacaagccggcggcgcgagctgagcgaccgcgagctgatgctgagtctgcgccgggcgctggtaggaggcgccaccggcggtgaggagtcctactttgacatgggggcggacctgcattggcagccgagccgacgcgccttggaggccgcctacggtccagaggacttggatgaggaagaggaagaggaggaggatgcacccgttgcggggtactgacgcctccgtgatgtgtttttagatgcagcaagccccggaccccgccataagggcggcgctgcaaagccagccgtccggtctagcatcggacgactgggaggccgcgatgcaacgcatcatggccctgacgacccgcaaccccgagtcctttagacaacagccgcaggccaacagactctcggccattctggaggcggtggttccttctcggaccaaccccacgcacgagaaggtgctggcgatcgtgaacgcgctggcggagaacaaggccatccgtcccgacgaggccgggctagtgtacaacgccctgctggagcgcgtgggccgctacaacagcacaaacgtgcagtccaacctggaccggctggtgacggacgtgcgcgaggccgtggcgcagcgcgagcggttcaagaacgagggcctgggttcgctggtggcgctgaacgccttcctggcgacgcagccggcgaacgtgccgcgcgggcaggatgattataccaactttataagcgcgctgcggctgatggtgaccgaggtgccccagagcgaggtgtaccagtcgggcccggactactttttccagacgagcagacagggcctgcagacggtgaacctgagtcaggctttcaagaacctgcgcgggctgtggggcgtgcaggcgcccgtgggcgaccggtcgacggtgagcagcttgctgacgcccaactcgcggctgctgctgctgctgatcgcgcccttcaccgacagtggcagcgtgaaccgcaactcgtacctgggtcacctgctgacgctgtaccgcgaggccataggccaggcgcaggtggatgagcagaccttccaggagatcactagcgtgagccgcgcgctgggtcagaacgacaccgacagtctgagggccaccctgaacttcttgctgaccaatagacagcagaagatcccggcgcagtacgcgctgtcggccgaggaggagcgcatcctgagatatgtgcagcagagcgtagggctgttcctgatgcaggagggggccacccccagcgccgcgctggacatgaccgcgcgcaacatggaacctagcatgtacgccgccaaccggccgtttattaataagctgatggactacctgcaccgcgcggcgtccatgaactcggactactttaccaatgccatcttgaacccgcactggctcccgccgccggggttctacacgggcgagtacgacatgcctgaccccaacgacgggtttttgtgggacgacgtggacagcgcggtgttctcaccgaccttgcaaaagcgccaggaggcggtgcgcacgcccgcgagcgagggcgcggtgggtcggagcccctttcctagcttagggagtttgcatagcttgccgggctcggtgaacagcggcagggtgagccggccgcgcttgctgggcgaggacgagtacctgaacgactcgctgctgcagccgccgcgggtcaagaacgccatggtcaataacgggatagagagtctggtggacaaactgaaccgctggaaaacctacgctcaggaccatagggaacctgcgcccgcgccgcggcgacagcgtcacgaccggcagcggggcctggtgtgggacgacgaggactcggccgacgatagcagcgtgttggacttgggcgggagcggtggggccaacccgttcgcgcatctgcagcccagactggggcgacggatgttttgaatgcaaaataaaactcaccaaggccatagcgtgcgttctcttccttgttagagatgaggcgcgcggtggtgtcttcctctcctcctccctcgtacgagagcgtgatggcgcaggcgaccctggaggttccgtttgtgcctccgcggtatatggctcctacggagggcagaaacagcattcgttactcggagctggctccgctgtacgacaccactcgcgtgtatttggtggacaacaagtcggcggacatcgcttccctgaactaccaaaacgaccacagcaacttcctgaccacggtggtgcagaacaacgatttcacccctgccgaggccagcacgcagacgataaattttgacgagcggtcgcggtggggcggtgatctgaagaccattctgcacaccaacatgcctaatgtgaacgagtacatgttcaccagcaagtttaaggcgcgggtgatggtggctagaaaaaaggcggaaggggctgatgcaaatgataggagcaaggatatcttagagtatcagtggtttgagtttaccctgcccgagggcaacttttccgagaccatgaccatagacctaatgaacaacgccatcttggaaaactacttgcaagtggggcggcaaaatggcgtgctggagagtgatatcggagtcaagtttgacagcagaaatttcaagctgggctgggacccggtgaccaagctggtgatgccaggggtctacacctacgaggccttccacccggacgtggtgctgctgccgggctgcggggtggatttcaccgagagccgcctgagcaacctcctgggcattcgcaagaagcaaccttttcaagagggcttcagaatcatgtatgaggacctagtagggggcaacatccccgctctcctgaatgtcaaggagtatctgaaggataaggaagaagctggcaaagcagatgcaaatactattaaggctcagaatgatgccgtcccaagaggagataactatgcatcagcggcagaagccaaagcagcaggaaaagaaattgagttgaaggccattttgaaagatgattcagacagaagctacaatgtgatcgagggaaccacagacaccctgtaccgcagttggtacctgtcctatacctacggggatcccgagaagggggtgcagtcgtggacgctgctcaccaccccggacgtcacctgcggcgcggagcaagtctactggtcgctgccggacctcatgcaagaccccgtcaccttccgctctacccagcaagtcagcaactaccccgtggtcggcgccgagctcatgcccttccgcgccaagagcttttacaacgacctcgccgtctactcccagctcatccgcagctacacctccctcacccacgtcttcaaccgcttccccgacaaccagatcctttgccgcccgcccgcgcccaccatcaccaccgtcagtgaaaacgtgcctgctctcacagatcacgggacgctaccgctgcgcagcagtatccgcggagtccagcgagtgaccgtcactgacgcccgtcgccgcacctgtccctacgtctacaaggccctgggcatagtcgcgccgcgcgtgctttccagtcgcaccttctaaaaaatgtctattctcatctcgcccagcaataacaccggctggggtcttactaggcccagcaccatgtacggaggagccaagaaacgctcccagcagcaccccgtccgcgtccgcggtcacttccgcgctccctggggcgcttacaagcgggggcggacctctgctcctgccgccgtgcgcaccaccgtcgacgacgtcatcgactcggtggtcgccgatgcgcgcaactacacccccgccccctcgaccgtggacgcggtcatcgacagcgtggtggcagacgcgcgtgactatgccagacgcaagagccggcggcgacggatcgccaggcgccaccggagcacgcccgccatgcgcgccgcccgagctctgctgcgccgcgccagacgcacgggccgccgggccatgatgcgagccgcgcgccgcgctgccactgcacccacccccgcaggcaggactcgcagacgagcggccgctgccgccgccgcggccatctctagcatgaccagacccaggcgcggaaacgtgtactgggtgcgcgactccgtcacgggcgtgcgcgtgcccgtgcgcacccgtcctcctcgtccctgatctaatgcttgtgtcctcccccgcaagcgacgatgtcaaagcgcaaaatcaaggaggagatgctccaggtcgtcgccccggagatttacggaccaccccaggcggaccagaaaccccgcaaaatcaagcgggttaaaaaaaaggatgaggtggacgagggggcagtagagtttgtgcgcgagttcgctccgcggcggcgcgtaaattggaaggggcgcagggtgcagcgtgtgttgcggcccggcacggcggtggtgttcacgcccggcgagcggtcctcggtcaggagcaagcgtagctatgacgaggtgtacggcgacgacgacatcctggaccaggcggcggagcgggcgggcgagttcgcctacgggaagcggtcgcgcgaagaggagctgatctcgctgccgctggacgaaagcaaccccacgccgagcctaaagcccgtgaccctgcagcaggtgctgccccaggcagtgctgctgccgagccgcggggtcaagcgcgagggcgagagcatgtacccgaccatgcagatcatggtgcccaagcgccggcgcgtggaggacgtgctggacaccgtaaaaatggatgtggagcccgaggtcaaggtgcgccccatcaagcaggtggcgccgggcctgggcgtgcaaaccgtggacattcagatccccaccgacatggatgtcgacaaaaaaccctcgaccagcatcgaggtgcaaaccgacccctggctcccagcctccaccgctaccgcgtccacttctaccgccgccacggctaccgagcctcccaggaggcgaagatggggcgccgccagccggctgatgcccaactacgtgttgcatccttccatcatcccgacgccaggctaccgcggcacccggtactacgccagccgcaggcgcccagccagcaaacgccgccgccgcaccgccacccgccgccgtctggcccccgcccgcgtgcgccgcgtgaccacgcggcggggccgctcgctcgttctgcccaccgtgcgctaccaccccagcatcctttaatccgtgtgctgtgatactgttgcagagagatggctctcacttgccgcctgcgcatccccgtcccgaattaccgaggaagatcccgccgcaggagaggcatggcaggcagtggcctgaaccgccgccggcggcgggccatgcgcaggcgcctgagtggcggctttctgcccgcgctcatccccataatcgccgcggccatcggcacgatcccgggcatagcttccgttgcgctgcaggcgtcgcagcgccgttgatgtgcgaataaagcctctttagactctgacacacctggtcctgtatatttttagaatggaagacatcaattttgcgtccctggctccgcggcacggcacgcggccgttcatgggcacctggaacgagatcggcaccagccagctgaacgggggcgccttcaattggagcagtgtctggagcgggcttaaaaatttcggctcgacgctccggacctatgggaacaaggcctggaatagtagcactgggcagttgttaagggaaaagctcaaagaccagaacttccagcaaaaggtggtggacgggctggcctcgggcattaacggggtggtggacatcgcgaaccaggccgtgcagcgcgagataaacagccgcctggacccgcggccgcccacggtggtggagatggaagatgcaactcttccgccgcccaagggcgagaagcgaccgcggcccgacgcggaggagacaatcctgcaagtggacgagccgccctcgtacgaggaggccgtcaaggccggcatgcccaccacgcgcatcatcgcgccgctggccacgggtgtaatgaaacccgctacccttgacctgcctccaccacccacgcccgctccaccaaaagcagctccggttgtgcagccccctccggtggcgaccgccgtgcgccgcgtccccgcccgccgccaggcccagaactggcagagcacgctgcacagtatcgtgggcctgggagtgaaaagtctgaagcgccgccgatgctattgagagagagtaaagaggacactaaagggagagcttaacttgtatgtgccttaccgccagagaacgcgcgaagatggccaccccctcgatgatgccgcagtgggcgtacatgcacatcgccgggcaggacgcctcggagtacctgagcccgggtctggtgcagtttgcccgcgccaccgacacgtacttcagcctgggcaacaagtttaggaaccccacggtggctcccacccacgatgtgaccacggaccggtcccagcgtctgacgctgcgctttgtgcccgtggatcgcgaggacaccacgtactcgtacaaggcgcgcttcactctggccgtgggcgacaaccgggtgctagacatggccagcacttactttgacatccgcggcgtcctggaccgcggcccaagcttcaaaccctactcgggcacggcttacaacagcctggcccccaagggcgcccccaatcccagtcagtggactaccaaagaaaagcaaaacggaggaactggagcagaaaaagatgttacaaagacatttggacttgccgccatgggaggcagtaatatttctaaagacggtttgcagattggaactgacaaaacagcaaatgctgaaaaaccaatctatgcagacaaaactttccagccagaacctcaagttggagaagaaaactggcaggataatgatgaatattatggcggcagggctcttaaaaaagataccaaaatgaagccatgctatggttcatttgctaaacccacaaacaaggaaggtgggcaggctaaattgaaagaaacacccaatggtaccgatcctcaatacgatgtggacatggctttctttgactcaagcactataaatataccagatgtggtgttgtacactgaaaatgtagatttggaaactccagatacacatgtggtgtacaaaccaggcaaagaggatgacagttctgaagctaatttaactcagcagtccatgcctaacagaccaaactacattggcttcagagacaactttgtggggctattgtactacaacagcactggcaacatgggtgtgctggctggtcaggcttctcagttgaatgccgtggtcgacttgcaagacagaaacaccgaactgtcttaccagctcttgctagattctcttggtgacagaaccagatattttagtatgtggaactctgcggtggacagctatgatcccgatgtcaggatcattgagaaccacggtgtggaagatgaacttcctaactattgcttccccttggacggtgttcaaactaattcagcctatcaaggtgttaaactaaagcctgatcaaacaggaggcggagttaatggagattgggtaaaggatgatgacatttcagcccataatcaaattggaaagggcaacatctttgccatggagatcaacctccaggccaacctgtggaagagttttctgtactcgaacgtggccctgtacctgcccgactcctacaagtacacgccggccaacgtcacgctgcccgccaacaccaacacctatgagtacatgaacggccgcgtggtagccccctcgctggtggacgcctacattaacatcggcgcccgctggtcgctggaccccatggacaacgtcaacccctttaaccaccaccgcaatgcgggcctgcgctaccgctccatgcttttgggcaatggccgctacgtgcccttccacatccaagtgccccaaaagttctttgccatcaagaacctgctcctgctccccggctcctacacctacgagtggaacttccgcaaggatgtcaacatgatcctgcagagttccctcggaaacgacctgcgcgtcgacggcgcctccgtccgcttcgacagcgtcaacctctacgccaccttcttccccatggcgcacaacaccgcctccaccctggaagccatgctgcgcaacgacaccaacgaccagtccttcaacgactacctctcggccgccaacatgctctaccccatcccggccaaggccaccaacgtgcccatttccatcccctcgcgcaactgggccgccttccgcggctggagtttcacccggctcaagaccaaggaaactccctcccttggctcgggttttgacccctactttgtctactcgggctccatcccctacctcgacgggaccttctacctcaaccacaccttcaagaaggtttccatcatgttcgactcctcggtcagctggcccggcaacgaccggctgcttacgccgaacgagttcgagatcaagcgcagcgtcgacggggagggctacaacgtggcccaatgcaacatgaccaaggactggttcctcgtccagatgctctcccactacaacatcggctaccagggcttccatgtgcccgagggctacaaggaccgcatgtactccttcttccgcaacttccagcccatgagcaggcaggtggtcgatgagatcaactacaaggactacaaggcagtcaccctgcccttccagcacaacaactctggcttcaccggctacctggcacccaccatgcgtcaggggcagccctaccccgccaacttcccctacccgctcatcggctccaccgcagtgccatccgtcacccagaaaaagttcctctgcgacagggtcatgtggcgcatccccttctccagcaacttcatgtccatgggcgccctcaccgacctgggtcagaacatgctctacgccaactcggcccacgcgctcgacatgaccttcgaggtggaccccatggatgagcccaccctcctctatcttctcttcgaagttttcgacgtggtcagagtgcaccagccgcaccgcggcgtcatcgaggccgtctacctgcgcacgcccttctccgccggcaacgccaccacctaagcatgagcggctccagcgaacgagagctcgcggccatcgtgcgcgacctgggctgcgggccctactttttgggcacccacgacaagcgcttcccgggcttcctcgccggcgacaagctggcctgcgccatcgtcaacacggccggccgcgagaccgggggcgtgcactggctcgcctttggctggaacccgcgctcgcgcacctgctacatgttcgaccccttcgggttctcggaccgccggctcaagcagatttacagcttcgagtacgaggccatgctgcgccgaagcgccctggcctcctcgcccgatcgctgtcttagcctcgaacagtccacccagaccgtgcaggggcccgactccgccgcctgcggactcttctgttgcatgttcttgcatgccttcgtgcactggcccgaccgacccatggacgggaaccccaccatgaacttgctgacgggggtgcccaacggcatgctacaatcgccacaggtgctgcccaccctcaggcgcaaccaggaggagctctaccgcttcctcgcgcgccactccccctactttcgctcccaccgcgccgccatcgaacacgccaccgcttttgataaaatgaaacaactgcgtgtatgactcaaataaacagcacttttattttacacatgcgctggagtatatgcaagttatttaaaagtcgaaggggttctcgcgctcgtcgttgtgcgccgcgctggggagggccacgttgcggtactggaacttgggctgccacttgaactcggggatcaccagtttgggcactggagtctcggggaaggtctcgctccacatgcgccggctcatttgcagggcgcccagcatgtcagggccggagatcttgaaatcgcagttgggaccggtgctctgcgcgcgcgagttgcggtacacggggttgcagcactggaacaccatcagactggggtacttcacactggcaagcacgctcttgtcgctaatctgatccttgtccaggtcctcggcgttgctcaggccgaacggggtcatcttgcacagctggcggcccaggaagggcacgctctgaggcttgtggttacactcgcagtgcacgggcatcagcatcatccccgcgccgcgctgcatattcgggtagagggccttgacgaaggccgcgatctgcttgaaagcttgctgggccttggccccctcgctaaaaaacaggccgcagctcttcccgctgaactggttattcccgcacccggcatcatgcacgcagcagcgcgcgtcatggctggtcagttgcaccacgctccgtccccagcggttctgggtcaccttagccttgctgggctgctccttcagcgcgcgctgtccgttctcgctggtcacatccatctccaccacgtggtccttgtgaatcatcaccgttccatgcagacacttgagctgaccttccacctcggtgcagccgtgatcccacaggacgcagccggtgcactcccaattcttgtgcgcgatcccgctgtggctgaaaatgtaaccttgcaacaggcgacccataatggtgctaaatgctttctgggtggtgaatgtcagttgcatcccgcgggcctcctcgttcatccaggtctggcacatcttctggaagatctcggtctgctccggcatgagcttgtaagcatcgcgcaagccgctgtcgacgcggtagcgttccatcagcacgttcatggtatccatgcccttctcccatgacgagaccagaggcagactcagggggttgcgcacgttcaggacaccaggggtcgcgggctcgacgatgcgttttccgtccttgccttccttcaacagaaccggaggctggctgaatcccactcccacgatcacggcgtcttcctggggcatctcttcgtcggggtctaccttggtcacatgcttggtctttctggcttgcttcttttttggagggctgtccacggggaccacgtcctcctcggaagacccggagcccacccgctgatactttcggcgcttggtgggcagaggaggtggcggcggcgaggggctcctctcctgctccggcggatagcgcgccgacccgtggccccggggcggagtggcctctcgctccatgaaccggcgcacgtcctgactgccgccggccattgtttcctaggggaagatggaggagcagccgcgtaagcaggagcaggaggaggacttaaccacccacgagcaacccaaaatcgagcaggacctgggcttcgaagagccggctcgtctaaaacccccacaggatgaacaggagcacgagcaagacgcaggccaggaggagaccgacgctgggctcgagcatggctacctgggaggagaggaggatgtgctgctaaaacacctgcagcgccagtccctcatcctccgggacgccctggccgaccggagcgaaacccccctcagcgtcgaggagctgtgtcgggcctacgagctcaacctcttctcgccgcgcgtgccccccaaacgccagcccaacggcacctgcgagcccaacccgcgtctcaacttctatcccgtctttgcggtccccgaggcccttgccacctatcacatctttttcaagaaccaaaagatccccatctcctgtcgcgccaatcgcactcgcgccgacgcgctcctcgctctggggcccggcgcgcgcatacctgatatcgcttccctggaagaggtgcccaagatcttcgaagggctcggtcgggacgagacgcgcgcggcaaacgctctgaaagaaacagcagaggaagagggttacactagcgccctggtagagttggaaggcgacaacgccaggctggccgtgcttaagcgcagcgtcgagctcacccatttcgcctaccccgccgtcaacctcccgcccaaggtcatgcgtcgcatcatggatcagctcatcatgccccacatcgaggcccttgatgaaagtcaggaacagcgccccgagaacgcccagcccgtggtcagcgacgagatgctcgcgcgctggctcgggacccgcgacccccaggccctggagcagcggcgcaagctcatgctggccgtggtcctggtcacccttgagctcgaatgcatgcgccgcttttttaccgaccccgagaccctgcgcaaggtcgaggagaccctgcactacactttcagacacggtttcgtcaggcaggcctgcaagatctccaacgtggagctgaccaacctggtctcctgcctggggatcctacacgagaaccgcttgggacagaccgtgctccactctaccctgaagggcgaggcgcggcgggactacatccgcgactgcgtctttctctttctctgccacacatggcaagcggccatgggcgtgtggcagcagtgtctcgaggacgagaacctgaaggagctggacaagcttcttgctagaaaccttaaaaagctgtggacgggcttcgacgagcgcaccgtcgcctcggacctggccgagatcgtcttccccgagcgcctgaggcagacgctgaaaggagggctgcccgacttcatgagccagagcatgttgcaaaactaccgcactttcattctcgagcgatctgggatgctgcccgccacctgcaacgccttcccctccgactttgtcccgctgagctaccgcgagtgtcccccgccgctgtggagccactgctacctcttgcagctggccaactacattgcccaccactcggatgtgatcgaggacgtgagcggcgaggggctgctcgagtgccactgtcgctgcaacctatgctccccgcaccgctccctggtctgcaacccccagctactgagcgagacccaggtcatcggtacctttgagctgcaaggtccgcaggagtccaccgctccgctgaaactcacgccggggttgtggacttccgcgtacctgcgcaaatttgtacccgaggactactacgcccatgagataaagttcttcgaggaccaatcgcgtccgcagcacgcggatctcacggcctgcgtcatcacccagggcgcgatcctcgcccaattgcacgccatccaaaaatcccgccaagagtttcttctgaaaaagggtagaggggtctacctggacccccagacgggcgaggtgctcaacccgggtctcccccagcatgccgaggaagaagcaggagccgctagtggaggagatggaagaagaatgggacagccaggcagaggaggacgaatgggaggaggagacagaggaggaagacttggaagaggtggaagaggagcaggcaacagagcagcccgtcgccgcaccatccgcgccggcagcccctccggtcacggatacaacctccgcagctccggccaagcctcctcgtagatgggatcgagtgaagggtgacggtaagcacgagcgacagggctaccgatcatggagggcccacaaagccgcgatcatcgcctgcttgcaagactgcggggggaacatcgctttcgcccgccgctacctgctcttccaccgcggggtgaacatcccccgcaacgtgttgcattactaccgtcaccttcacagctaagaaaaagcaagtcaaaggagtcgccggaggaggaggcctgaggatcgcggcgaacgagcccttgaccaccagggagctgaggaaccggatcttccccactctttatgccatttttcagcaaagtcgaggtcagcagcaagagctcaaagtaaaaaaccggtctctgcgctcgctcacccgcagttgcttgtaccacaaaaacgaagatcagctgcagcgcactctcgaagacgccgaggctctgttccacaagtactgcgcgctgactcttaaagactaaggcgcgcccacccggaaaaaaggcgggaattacctcatcgccaccatgagcaaggagattcccaccccttacatgtggagctatcagccccagatgggcctggccgcgggcgcctcccaggactactccacccgcatgaactggcttagtgccggcccctcgatgatctcacgggtcaacggggtccgtaaccatcgaaaccagatattgttgcagcaggcggcggtcacctccacgcccagggcaaagctcaacccgcgtaattggccctccaccctggtgtatcaggaaatccccgggccgactaccgtactacttccgcgtgacgcactggccgaagtccgcatgactaactcaggtgtccagctggccggcggcgcttcccggtgcccgctccgcccacaatcgggtataaaaaccctggtgatccgaggcagaggcacacagctcaacgacgagttggtgagctcttcaatcggtctgcgaccggacggagtgttccaactagccggagccgggagatcgtccttcactcccaaccaggcctacctgaccttgcagagcagctcttcggagcctcgctcgggaggcatcggaaccctccagttcgtggaggagtttgtgccctcggtctacttcaaccccttctcgggctcgccaggcctctacccggacgagtttataccgaacttcgacgcagtgagagaagcggtggacggctacgactgaatgtcctatggtgactcggctgagctcgctcggttgaggcatctggaccactgccgccgcctgcgctgctttgcccgggagagctacggcctcatctactttgagctgcccgaggagcaccccaacggccctgcacacggagtgcggatcaccgtagagggcaccaccgagtctcacctggtcaggttcttcacccagcaacccttcctggtcgagcgggaccggggcgccaccacctacaccgtctactgcatttgtcctaccccgaagttgcatgagaatttttgttgtactctttgtggtgagtttaataaaagctaaactcttgcaatactctggaccttgtcgtcatcaactcaacgagaccgtctacctcaccaaccagactgaggtaaaacttacctgcagaccacacaagacctatatcatctggttcttcgagaacacctcatttgcagtctccaacactcactgcaacgacggtgttgaacttcccaacaacctttccagtggactgagttacaatacacgtagagctaagctcatcctctacaatccttttgtagagggaacctaccagtgccagagcggaccttgcttccacagttttactttggtgaacgttaccggcagcagcacagccgctccagaaactaaccttccttctgatactatcaaaccttgtttcggaggtgagctaaggcttcccccttctcaggagggggttagcccatacgaagtggtcgggtatttgattttaggggtggtcctgggtgggtgcatagcggtgctagctcagctgccttgctgggtggaaatcaaaatctttatatgctgggtaagacattgtggggaggaactatgaaggggctcttgctgattatcctttccctggtggggggtgtgctgtcatgccacgaacagccacgatgtaacatcaccacaggcaatgagaggaacgactgctctgtagttatcaaatgcgagcaccattgtcctctcaacattacattcaaaaataagaccatgggaaatgtatgggtgggattctggcaaccaggagatgagcagaactacacggtcactgtccatggtagcaatggcaatcacactttcggtttcaaattcatttttgaagtcatgtgtgatatcacactacatgtggctagacttcatggcttgtggccccctaccaaggataacatggtgggtttttctttggcttttgtgatcatggcctgcttgatgtcaggtctgctggtaggggctctagtgtggtttctgaaacgcaagcccaggtatggaaatgaagagaaggaaaaattgctataaattctttttctttttcgcagaaccatgaatacagtgatccgtatcgtgctgctctctcttcttgtagcttttagtcaggcaggatttcatactatcaatgctacatggtgggctaatataactttagtgggacccccagacacaccagtcacttggtatgatactcaaggattgtggttttgcaatggcagtagagttaagaatcctcaaatcagacatacatgtaatgatcaaaaccttactttgatccatgtgaacaaaacttatgaaagaacatacatgggttataatagacaagggactaaaaaagaagactacaaagttgtagttataccacctcctcctgctactgtaaaaccacagccagagccagagtatgtgtttgtttatatgggagagaacaaaactctagaaggtcctccgggaactccagtcacatggtttaatcaggatggaaagaaattttgtgaaggagaaaaagttcttcatccagaatttaaccacacctgtgacaaacaaaaccttatactactgtttgtgaattttacacatgatggagcttaccttgggtacaatcatcaaggaacccagagaacacactatgaagttacagtattagatctttttccagattctggccaaatgaaaattgaaaatcatagtgaggaaacagagcaaaaaaatgatgaacatcataactggcagaaacagggtgggcaaaaacagggtgggcaaaaaacaaatcaaacaaaagttaatgacaggagaaaaacagcgcaaaaaagaccatcaaagctaaagccggcaactattgaggcaatgctggttacagtgactgccgggtctaacttaactttggttggacctaaagcagaaggaaaagttacttggtttgatggagatttaaaaagaccatgtgagcctaattacagactaagacacgaatgtaataatcaaaacttaactctgattaatgtaactaaagattatgagggaacttactatggtacaaatgacaaagatgagggcaaaaggtacagagtgaaagtaaatactacaaattctcaatctgtgaaaattcagccatataccagacaaactactcctgatcaagagcacaaatttgaattacagttcgaaactaatggaaattatgattcaaaaattccctcaaccactgtggcaatcgtggtgggtgtgattgcgggcttcataactctgatcattgtcttcatatgctacatctgctgccgcaagcgtcccagggcatacaatcatatggtagacccactactcagcttctcttactaagactcagtcactttcatttcagaaccatgaaggctttcacagcttgcgttctgattagcctagtcacacttagtgtagctattaaaaatcaatatcatgttcataatgttaccagagatggatatatcacattaaatgtaacaattgataatactacctggacaagatatcatttaaataagtggcatcaaatttgtacgtggtcagacccatcatacaaatgtcacagcaatggcagcattaccattcatgctttcaatattacttctggccagtacaaagctgaaagttttactaactggtttagatattacggtaatcataaacatgaaattcatatttttaacataactgtaattgagcatcctacaacaaaagcacccaccactgctaatacagctacatcaattaaatcaacaaccacacagcctactactagggagacaactcaacctaccaccacagtcagtacaactactgagaccactactcaaactacacagctagacacaacagtgcagaatagcactgtgttggttaggtatctgttgagggaggaaagtactactgaacagacagaggctacctcaagtgcctttagcagcactgcaaatttaacttcgcttgcttggactaatgaaaccggagtatcattgatgaatcatcagcctttctcaggtttggatattcaaattacttttctggttgtttgtgggatctttattcttgtggttcttctgtactttgtctgctgcaaagccagagagaaatctaggaggcccatctacaggccagtaatcggggaacctcagccactccaagtggaagggggtctaaggaatcttcttttctctttttcagtatggtgatcagccatgattcctaggttcttcctatttaacatcctcttctgtctcttcaacatctgcgctgcctttgcagccgtctcgcacgcctcgcccgactgtctcgggcccttcccaacctacctcctctttgccctgctcacctgcacctgcgtctgcagcattgtctgcctggtcatcaccttcctgcagcttatcgactggtgctgtgcgcgctacaattatctccatcacagtcccgaatacagggacaagaacgtagccagaatcttaaggctcatctgaccatgcagactctgctcatgctgctatccctcctatcccctgccctagccacttatgctgattactctaaatgcaaattcgcagacatatggaatttcttagattgctatcaggaaaaaattgatatgccctcctattacttggtgattgtgggaatagtcatggtctgctcctgcactttctttgccatcatgatttacccctgttttgatctcggctggaactctgttgaagcattcacatacacactagaaagcagttcactagcctccacgccaccacccacaccgcctcctcgcagaaatcagttccccctgatacagtacttagaagagccccctccccgacccccttccactgttagctactttcacataaccggcggcgatgactgaccaccacctggacctcgagatggacggccaggcctccgagcagcgcatcctgcaactgcgcgtccgtcagcagcaggagcgggccgccaaggagctccttgatgccatcaacatccaccagtgcaagaagggcatcttctgcctggtcaaacaggcaaagatcacctacgagctcgtgtccaacggcaaacagcatcgccttacctatgagatgccccagcagaagcagaagttcacctgcatggtgggcgtcaaccccatagtcatcacccagcagtcgggcgagaccaacggctgcatccactgctcctgcgaaagccccgagtgcatctactcccttctcaagaccctttgcggactccgcgacctcctccccatgaactgatgttgattaaaagcccagaaaccaatcagacccttcctcatttccccatcccaatactcataagaataaatcattggaattaatcattcaataaagatcacttacttgaaatctgaaagtatgtctctggtgtagttgctcagcaacacctcggtaccctcctcccagctctggtactccagtccccggcgggcggcgaacttcctccacaccttgaaagggatgtcaaattcctggtccacaattttcattgtcttccctcttagatgtcaaagaggctccgggtggaagatgacttcaaccccgtctacccctatggctacgcgcggaatcagaatatccccttcctcactcccccctttgtctcctccgatggattcaaaaacttcccccctggggtactgtcactcaaactggctgatccaatcaccattaccaatggggatgtatccctcaaggtgggaggtggtctcactttgcaagatggaagcctaactgtaaaccctaaggctccactgcaagttaatactgataaaaaacttgagcttgcatatgataatccatttgaaagtagtgctaataaacttagtttaaaagtaggacatggattaaaagtattagatgaaaaaagtgctgcggggttaaaagatttaattggcaaacttgtggttttaacaggaaaaggaataggcactgaaaatttagaaaatacagatggtagcagcagaggaattggtataaatgtaagagcaagagaagggttgacatttgacaatgatggatacttggtagcatggaacccaaagtatgacacgcgcacactttggacaacaccagacacatctccaaactgcacaattgctcaagataaggactctaaactcactttggtacttacaaagtgtggaagtcaaatattagctaatgtgtctttgattgtggtcgcaggaaagtaccacatcataaataataagacaaatccaaaaataaaaagttttactattaaactgctatttaataagaacggagtgcttttagacaactcaaatcttggaaaagcttattggaactttagaagtggaaattccaatgtttcgacagcttatgaaaaagcaattggttttatgcctaatttggtagcgtatccaaaacccagtaattctaaaaaatatgcaagagacatagtttatggaactatatatcttggtggaaaacctgatcagccagcagtcattaaaactacctttaaccaagaaactggatgtgaatactctatcacatttaactttagttggtccaaaacctatgaaaatgttgaatttgaaaccacctcttttaccttctcctatattgcccaagaatgaaagaccaataaacgtgtttttcatttgaaattttcatgtatctttattgatttttacaccagcacgagtagacagtctcccaccaccagcccattttacagtgtacacggttctctcagcacgggtagccttaaatagggaaatattctcattagtgcgggaattggacttggggtctataatccacacagtttcctggcgagccaaacgggggtcggtgattgaaataaagccgtcctctgaaaagtcatccaagcgggcctcacagtccaaggtcacagtctggtggaacgagaagaacgcacagattcatactcggaaaacaggatgggtctgtgcctctccatcagcgccctcagcagtctctgccgccggggctcggtgcggctgctgcaaatgggatcgggatcacaagtctctctgactatgatcccaacagccttcagcatcagtctcctggtgcgacgggcacagcaccgcatcctgatctctgccatgttctcacagtaagtgcagcacataatcaccatgttattcagcagcccataattcagggcgctccagccaaagctcatgttgggaatgatggaacccacgtgaccatcgtaccagatgcgacagtatatcaggtgcctgcccctcatgaacacactgcccatgtacatgatctctttgggcatgtttctgtttacaatctggcggtaccaggggaagcgctggttgaacatgcacccgtaaatgactctcctgaaccacacggccagcagggtgcctcccgcccgacactgcagggagccaggggatgaacagtggcaatgcaggatccagcgctcgtacccgctcaccatttgagctcttaccaagtccagggtagcggggcacaggcacactgacatacatctttttaaaatttttatttcctctgtggtgaggatcatatcccaggggactggaaactcttggagcagggtaaagccagcagcacatggtaatccacggacagaacttacattatgataatctgcatgatcacaatcgggcaacaggggatgttgttcagtcagtgaagccctggtttcctcatcagatcgtggtaaacgggccctgcgatatggatgatggcggagcgagctggattgaatctcggtttgcattgtagtggattctcttgcgtaccttgtcgtacttctgccagcagaaatgggcccttgaacagcatatacccctcctacggccgtcctttcgctgctgccgctcagtcatccaactaaagtacatccattctcgaagattctggagaagttcctctgcatctgataaaataaaaaacccgtccatgcgaattcccctcatcacatcagccaggactctgtaggccatccccatccagttaatgctgccttgtctatcattcagagggggcggtggcaggactggaagaaccatttttattccaaacggtctcgaaggacgataaagtgcaagtcacgcaggtgacagcgttcccctccgctgtgctggtggaaacagacagccaggtcaaaacccactctattttcaaggtgctcgaccgtggcttcgagcagtggctctacgcgcacatccagcataagaatcacattaaaggctggccctccatcgatttcatcaatcatcaggttacattcctgcaccatccccaggtaattctcatttttccagccttggattatctctacaaattgttggtgtaagtccactccgcacatgtggaaaagctcccacagtgccccctccactttcataatcaggcagaccttcataatagaaacagatcctgctgctccaccacctgcagcgtgttcaaaacaacaagattcaataaggttctgccctccgccctgagctcgcgcctcaatgtcagctgcaaaaagtcacttaagtcctgggccactacagctgacaattcagagccagggctaagcgtgggactggcaagcgtaagggaaaactttaatgctccaaagctagcacccaaaaactgcatgctggaataagctctctttgtgtctccggtgatgccttccaaaatgtgagtgataaagcgtggtagtttttctttaatcatttgcgtaatagaaaagtcctctaaataagtcactaggaccccagggaccacaatgtggtagcttacaccgcgtcgctgaagcatggttagtagagatgagagtctgaaaaacagaaagcatgcactaaactaaggtggctattttcactgaaggaaaaatcactctctccagcagcagggtacccactgggtggcccttgcggacatacaaaaatcggtccgtgtgattaaaaagcagcacagtaagttcctgtcttcttccggcaaaaatcacatcagactgggttagtatgtccctggcatggtagtcattcaaggccataaatctgccctgatatccagtaggaaccagcacactcacttttaggtgaagcaataccaccccatgcggaggaatgtggaaagattcagggcaaaaaaattatatctattgctagccccttcctggacgggagcaatccctccaggactatctataaaagcatacagagattcagccatagcttagcccgcttaccagtagacagaaagcacagcagtacaagcgccaacagcagcaactgactacccactgacccagctccctatttaaaggcaccttacactgacgtaatgaccaaaggtctaaaaaccccgccaaaaaaaacacacacgccctgggtgtttttcacaaaaacacttccgcgttctcacttcctcgtatcgattttgtgactcaacttccgggttcccacgttacgtcacttctgcccttacatgtaacttggccgtatggcgccatcttgcccacgtccaaaatggctttcatgaccggccacgcctccgcgccggccgttagccgtgcgtcgtgacgttatttgcatcaccgcttctcgtccaatcagcgttggctccgccccaaaaccgttaaaattcaaaagctcatttgcatattaacttttgtttactttgtggggtatattattgatgatgc

SEQ ID NO: 30 - DNA, 35148 bp, Adenovirus D69
  MISC_FEATURE (1)..(35148): Complete Genome
catcatcaataatataccccacaaagtaaacaaaagttaatatgtaaatgagcttttgaatttagggcggggccgacgctgattggccgttgcaagaaccgttagtgacgtcacgacgcacggccgacggccgccgcggaggcgtggcctagtccggaagcaagtcgcggggctgatgacgtataaaaaagcggactttagacccggaaacggccgattttcccgcggccacgcccggatatgaggtaattctgggcggatgcaagtgaaattaggccattttggcgcgaaaactgaatgaggaagtgaaaagtgaaaaataccgggcccgcccagggcggaatatttaccgagggccgagagactttgaccgattacgtgggggtttcgattgcggtgttttttcgtgaatttccgcgtccgtgtcaaagtccggtgtttatgtcacagatcagctgatccacagggtatttaaaccagtcgatcccgtcaagaggccactcttgagtgccagcgagtagagatttctctgagctccgctcccagagtctgagaaaaatgagacacctgcgcctcctgtcttcaactgtgcctattgacatggccgcattattgctggaggattatgtgagtacaatattggaggacgaactgcatccatctccattcgagctgggacctacacttcaggacctatatgatttggaggtagatgcccatgatgacgacccgaacgaagaggctgtgaatttaatatttccagaatctctgattcttcaggctgacatagccagcgaagctgtacctacaccacttcatacaccgactctgtcacccatacctgaattggaagaggaggacgagctagacctccgatgttatgaggaaggttttcctcccagcgattcagaggacgaacagggtgagcagagcatgactctaatctcagaatatgcttgtgtggttgtggaagagcattttgtgttggacaatcctgaggtgcccgggcaaggctgtagatcctgccagtaccaccgggataagaccggagacacgaacgcctcctgcgctctgtgttacatgaaaaagaacttcagctttatttacagtaagtggagtaaatgtgagagagactgagtgcttaacacataactgggtgatgcttaaacagctgtgctaagtgtggtttatttttgtttctaggtccggtgtcagaggatgagtcatcaccctcagaagaagaccacccgtgtccccctgagctgtcaggcgaaacgcccctgcaagtgcacagacccaccccagtcagacccagtggcgagaggcgagcagctgttgaaaaaattgaggacttgttacatgacatgggtggggatgaacctttggacctgagcttgaaacgccccaggaactaggctcagctgtgcttagtcatgtgtaaataaagttgtacaataaaagtatatgtgacgcatgcaaggtgtggtttatgactcatgggcgtggcttagtcctatataagtggcaacacctgggcactggggcacagaccttcagggagttcctgatggatgtgtggactatccttgcagactttagcaagacacgccggcttgtagaggatagttcagacgggtgctccgggttctggagacactggtttggaactcctctatctcgtctggtgtacacagttaagaaggattataacgaggaaattgaaaatctttttgctgattgctctggcctgctagattctctgaatctcggccaccagtcccttttccaggaaagggtactccacagccttgatttttccagcccagggcgcactacagccggggttgcttttgtggtttttctggttgacaaatggagccagaacacccaactgagcaggggctacattctggacttcgcagccatgcacctgtggagggcatgggtgaggcagcggggacagagaatcttgaactactggcttatacagccagcagctccgggtcttcttcgtctacacagacaaacatccatgttggaggaagaaatgaggcaggccatggacgagaacccgaggagcggcctggaccctccgtcggaagaggagctggattgaatcaggtatccagcttgtacccagagcttagcaaggtgctgacatccatggccaggggagtgaagagggagaggagcgatgggggcaataccgggatgatgaccgagctgacggccagcctgatgaatcgcaagcgcccagagcgcattacatggcacgagctacagatggagtgcagggatgagttgggcctgatgcaggataaatatggcctggagcagataaaaacacattggttgaacccagatgaggattgggaggaggccattaagaaatatgccaagatagccctgcgcccagattgcaagtacatagtgaccaagaccgtgaatattagacatgcctgctacatttcgggtaacggggcagaggtggtcatcgataccctggacaaggccgccttcaggtgttgcatgatgggaatgagagcaggagtgatgaatatgaattccatgatcttcatgaacatgaagttcaatggagagaagtttaatggggtgctgttcatggccaacagccacatgaccctgcatggctgcagtttctttggcttcaacaatatgtgcgccgaggtctggggcgcttccaagatcaggggatgtaagttttatggctgttggatgggcgtagtgggaagacccaagagcgagatgtctgtgaagcagtgtgtgtttgagaaatgctacctgggagtctctaccgagggcaatgctagagtgagacactgctcttccctggatacgggctgtttctgcctggtgaagggtacggcctctctgaagcataatatggtgaagggctgcacagatgagcgcatgtacaacatgctgacctgcgactcgggggtctgccatatcctgaagaacatccatgtgacctcccaccccagaaagaagtggccagtgtttgagaataacctgctgatcaagtgccatatgcacctgggtgccagaaggggcaccttccagccgtaccagtgcaactttagccagaccaagctgctgttggagaacgatgccttctccagggtgaacctgaacggcatctttgacatggatgtctcggtgtacaagatcctgagatacgatgagaccaggtccagggtgcgcgcttgcgagtgcgggggcagacacaccaggatgcagcctgtggccctggatgtgacagaggagctgagaccagaccacctggtgatggcctgtaccgggaccgagttcagctccagcggggaggacacagattagaggtaggtttgagtagtgggcgtggctaatgtgagtataaaggtgggtgtcttacgagggtctttttgcttttctgcagacatcatgaacgggaccggcggggccttcgaaggggggctttttagcccttatttgacaacccgcctgccgggatgggccggagttcgtcagaatgtgatgggatctacggtggatgggcgcccagtgcttccagcaaattcctcgaccatgacctacgcgaccgtggggaactcgtcgctcgacagcaccgccgcagccgcggcagccgcagccgccatgacagcgacgagactagcctcgagctacatgcccagcagcggtagcagcccctctgtgcccagttccatcatcgccgaggagaaactgctggccctgctggccgagctggaagccctgagccgccagctggccgccctgacccagcaggtgtccgagctccgcgagcagcagcagcaaaataaatgattcaataaacacagattctgattcaaaagcaaagcatctttattatttattttttcgcgcgcggtaggccctggtccacctctcccgatcattgagagtgcggtggattttttccaggacccgatagaggtgggattggatgttgaggtacatgggcatgagcccgtcccgggggtggaggtagcaccactgcatggcctcgtgctctggggtcgtgttgtagatgatccagtcatagcaggggcgctgggcgtggtgctggatgatgtccttgaggaggagactgatggccacggggagccccttggtgtaggtgttggcaaaacggttgagctgggagggatgcatgcggggggagatgatgtgcagtttggcctggatcttgaggttggcgatgttgccgcccagatcccgccgggggttcatgttgtgcaggaccaccaggacggtgtagcctgtgcacttggggaacttgtcatgcaacttggaagggaatgcgtggaagaatttggagacgcccttgtgcccgcccaggttttccatgcactcatccatgatgatggcaatgggcccgtgggctgcggctttggcaaagacgtttctggggtcagagacatcataattatgctcctgggtgagatcatcataagacattttaatgaatttggggcggagggtgccagattgggggactatggttccctcggggcccggggcgaagttcccctcgcagatctgcatctcccaggctttcatctcggaggggggaatcatgtccacctgcggggcgatgaaaaaaacggtttccggggcgggggtgatgagctgcgaggagaggaggtttctcagcagctgggacttgccgcacccggtcggaccgtagatgaccccgatgactggttgcaggtggtagttcaaggagatgcagctgccgtcgtcccggaggaggggggccacctcgttaagcatgtctctgacttggaggttttcccggacgagctcgccgaggaggcggtccccgcccagcgagaggagctcttgcagggaagcaaagtttttcaggggcttgagtccgtcggccatgggcatcttggcgagggtctgcgagaggagttccaaccggtcccagagctcggtgacgtgctctacggcatctcgatccagcagacttcctcgtttcgggggttgggacgactgcgactgtagggcacgagacgatgggcgtccagcgcggccagcgtcatgtccttccagggtctcagggtccgagtgagggtggtctccgtcacggtgaatgggtgggccccgggctgggcgcttgcaagggtgcgcttgagactcatcctgctggtgctgaaacgggcacggtcttcgccctgcgcgtcggcgagatagcagttgaccatgagctcgtagttgagggcctcggcggcgtggcccttggcgcggagctttcctttggaagagcgcccgcaggcgggacataggagggattgcagggcgtagagcttgggcgctagaaagacggactcgggggcgaaggcgtccgctccgcagtgggcgcagacggtctcgcactcgacgagccaggtgagctcggggtgatcggggtcaaaaaccagttttcccccgttctttttgatgcgcttcttacctcgcgtctccatgagtctgtgtccgcgttcggtgacaaacaggctgtctgtgtccccgtagacggacttgatgggcctgtcctgcaggggcgtcccgcggtcctcctcgtagagaaactcggaccactctgagacaaaggcgcgcgtccacgccaagacaaaggaggccacgtgcgaggggtagcggtcgttgtccaccagggggtccaccttttccacggtatgcagacacatgtccccctcctccgcatccaagaaggtgattggcttgtaggtgtaggccacgtgacctggggtccccgacgggggggtataaaagggggcgggtctgtgctcgtcctcactctcttccgcgtcgctgtctacgagcgccagctgttggggtaggtattccctctcgagagcgggcatgacctcggcactcaggttgtcagtttctagaaacgaggaggatttgatgttggcctgccctgccgcgatgcttttgagtaaactttcatccatctggtcagaaaagacaatttttttattgtcaagcttggtggcgaaggagccatagagggcgttggagagaagcttggcgatggatctcatggtctgatttttgtcacggtcggcgcgctccttggccgcgatgttgagctggacatactcgcgcgcgacgcacttccattcggggaagacggtggtgcgctcgtcgggcacgatcctgacgcgccagccgcggttatgcagggtgaccaggtccacgctggtggccacctcgccgcgcaggggctcgttggtccagcagagtctgccgcccttgcgcgagcagaacgggggcagcacatccaggaggtgctcgtcgggggggtccgcatcgatggtgaagatgcccggacagagttccttgtcaaaataatcgatttttgaggatgcatcatccaaggccatctgccactcgcgggcggccagcgctcgctcgtaggggttgaggggcggaccccaaggcatgggatgtgtgagggcggaggcgtacatgccgcagatgtcgtagacatagatgggctccgagaggatgccgatgtaggtgggataacagcgccccccgcggatgctggcgcgcacgtagtcatacaactcgtgcgagggggccaagaaggcggggccgagattggtgcgctggggctgctcggcgcggaagacgatctggcgaaagatggcatgcgagtttgaggagatggtgggccgttggaagatgttaaagtgggcgtggggcaggcggaccgagtcgcggatgaagtgcgcgtaggagtcttgcagcttggcgacgagctcggcggtgacgaggacgtccatggcgcagtagtccagtgtttcgcggatgatgtcataacccgcctctcctttcttctcccatagctcgcggttgagggcgtactcctcgtcatccttccagtactcccggagcgggaatcctcgatcgtccgcacggtaagagcccagcatgtagaaatggttcacggccttgtagggacagcagcccttctccacggggagggcgtaagcttgagcggccttgcggagcgaggtgtgcgtcagggcgaaggtgtccctgaccatgactttcaagaactggtacttgaagtccgagtcgtcgcagccgccgtgctcccagagctcgaaatcggtgcgcttcttcgagagggggttaggcagagcgaaagtgacgtcattgaagagaatcttgcctgcccgcggcatgaaattgcgggtgatgcggaaagggcccgggacggaggctcggttgttgatgacctgggcggcgaggacgatctcgtcgaagccgttgatgttgtgcccgacgatgtagagttccatgaatcgcgggcggcctttgatgtgcggcagctttttgagttcctcgtaggtgaggtcctcggggcattgcaggccgtgctgctcgagcgcccactcctggagatgtgggttggcttgcatgaaggaagcccagagctcgcgggccatgagggtctggagctcgtcgcgaaagaggcggaactgctggcccacggccatcttttctggggtgacgcagtagaaggtgagggggtcacgctcccagcgatcccagcgtaagcgcacggcgagatcgcgagcgagggcgaccagctcggggtcccccgagaatttcatgaccagcatgaaggggacgagctgcttgccgaaggaccccatccaggtgtaggtttctacatcgtaggtgacaaagagccgctccgtgcgaggatgagagccgattgggaagaactggatttcctgccaccagttggacgagtggctgttgatgtgatgaaagtagaaatcccgccggcgaaccgagcactcatgctgatgcttgtaaaagcgtccgcagtactcgcagcgctgcacgggctgtacctcatccacgagatacacagcgcgtcccttgaggaggaacttcaggagtggcggccctggctggtggttttcatgttcgcctgcgtgggactcaccctggggctcctcgaggacggagaggctgacgagcccgcgcgggagccaggtccagatctcggcgcggcgggggcggagagcgaagacaagggcgcgcagttgggagctgtccatggtgtcgcggagatccaggtcagggggcagggttctgaggttgacctcgtagaggcgggtgagggcgtgcttgagatgcagatggtacttgatttctacgggtgagttggtggccgtgtccacgcattgcatgagcccgtagctgcgcggggccacgaccgtgccgcggtgcgcttttagaagcggtgtcgcggacgcgctcccggcggcagcggcggttccggccccgcgggcaggggcggcagaggcacttcggcgtggcgctcgggcaggtcccggtgctgcgccctgagagcgctggcgtgcgcgacgacgcggcggttgacatcctggatctgccgcctctgtgtgaagaccactggccccgtgactttgaacctgaaagacagttcaacagaatcaatctcggcgtcattgacggcggcctgacgcaggatctcttgcacgtcgcccgagttgtcctggtaggcgatctcggacatgaactgctcgatctcctcctcctggagatcgccgcggcccgcgcgctcgacggtggcggcgaggtcgttggagatgcgacccatgagctgcgagaaggcgcccaggccgctctcgttccagacgcggctgtagaccacgtccccgtcggcgtcgcgcgcgcgcatgaccacctgcgctaggttgagctccacgtggcgcgtgaagacagcgtagttgcgcaggcgttggaagaggtagttgagggtggtggcgatgtgctcggtgacgaagaagtacatgatccagcggcgcaggggcatctcgctgatgtcgccgatggcctccagcctttccatggcctcgtagaagtccacggcgaagttgaaaaactgggcgttgcgggccgagaccgtgagctcgtcttccaggagccggatgagctcggcgatggtggcgcgcacctcgcgctcgaaatccccgggggcctcctcctcttcctcttcttccatgacgacctcttcttctatttcttcctctgggggcggtggtggtggcggggcgcgacgacgacggcgacgcaccgggagacggtcgacgaagcgctcgatcatctccccgcggcggcgacgcatggtttcggtgacggcgcgaccccgttcgcgaggacgcagcgtgaagacgccgccggtcatctcccggtaatggggcgggtccccgttgggcagcgagagggcgctgacgatgcatcttatcaattgcggtgtaggggacgtgagcgcgtcgagatcgaccggatcggagaatctttcgaggaaagcgtctagccaatcgcagtcgcaaggtaagctcaaacacgtagcagccctgtggacgctgttagaattgcggttgctgatgatgtaattgaagtaggcgtttttgaggcggcggatggtggcgaggaggaccaggtccttgggtcccgcttgctggatgcggagccgctcggccatgccccaggcctggccctgacaccggctcaggttcttgtagtagtcatgcatgagcctttcaatgtcatcactggcggaggcagagtcttccatgcgggtgaccccgacgcccctgagcggctgcacgagcgccaggtcggcgacgacgcgctcggcgaggatggcctgttgcacgcgggtgagggtgtcctggaagtcgtccatgtcgacgaagcggtggtaggcccctgtgttgatggtgtaggtgcagttggccatgagcgaccagttaacggtctgcaagccgggctgcacgacctccgagtacctgagccgcgagaaggcgcgcgagtcgaatacgtagtcgttgcaggtgcgcacgaggtactggtatccgactagaaagtgcggcggcggctggcggtagagcggccagcgctgggtggccggcgcgcccggggccaggtcctcgagcatgaggcggtggtagccgtagacgtagcgggacatccaggtgatgccggcggcggtggtggaggcgcgcgggaactcgcggacgcggttccagatgttgcgcagcggcaggaaatagtccatggtcggcacggtctggccggtgagacgcgcgcagtcattgacgctctagaggcaaaaacgaaagcggttgagcgggctcttcctccgtagcctggcggaacgcaaacgggttaggccgcgtgtgtaccccggttcgagtcccctcgaatcaggctggagccgcgactaacgtggtattggcactcccgtctcgacccaagcccgatagccgccaggatacggcggagagccctttttgccggccgaggggggtcgctagacttgaaagcggccgaaaaccctgtcgggcagtggctcgcgcccgtagtctggagaagcatcgccagggttgagtcgcggcagaacccggttcgcggacggccgcggcgagcgggacttggtcaccccgccgatttaaagacccacagccagccgacttctccagttacgggagcgagcccccttttttctttttgccagatgcatcccgtcctgcgccaaatgcgtcccacccccccggcgaccaccgcgaccgcggccgtagcaggcgccggcgctagccagccacagccacagacagagatggacttggaagagggcgaagggctggcgagactgggggcgccgtccccggagcgacacccccgagtgcagctgcagaaggacgtgcgcccggcgtacgtgcctgcgcagaacctgttcagggaccgcagcggggaggagcccgaggagatgcgcgactgccggtttcgggcgggcagggagctgcgcgagggcctggaccgccagcgcgtgctgcgcgacgaggatttcgagccgaacgagcagacgggcatcagccccgcgcgcgctcacgtggcggcggccaatctggtgacggcctacgagcagacggtgaagcaggagcgcaacttccaaaagagtttcaacaaccacgtgcgcaccctgatcgcgcgcgaggaggtggccctgggcctgatgcacctgtgggacctggcggaggccatcgtgcagaacccggacagcaagcctctaacggcgcagctgttcctggtggtgcagcacagcagggacaacgaggcgttcagggaggcgctgctgaacatcgccgagcccgagggtcgctggctgctggagctgatcaacatcttgcagagcatcgtagtgcaggagcgcagcctgagcctggccgagaaggtggcggcgatcaactactcggtgttgagcctcggcaagttttacgcgcgcaagatttacaagacgccgtacgtgcccatagacaaggaggtgaagatagacagcttttacatgcgcatggcgctcaaggtgctgacgctgagcgacgacctgggcgtgtaccgcaacgaccgcatccacaaggccgtgagcacgagccggcggcgcgagctgagcgaccgcgagctcatgctgagtctgcgccgggcgctggtagggggcgccgccggcggcgaggagtcctacttcgacatgggggcggacctgcattggcagccgagccggcgcgccttggaggccgcctatggtccagaggacttggatgaggaagaggaagaggaggaggatgcacccgttgcggggtactgacgcctccgtgatgtgtttttagatgtcccagcaagccccggaccccgccataagggcggcgctgcaaagccagccgtccggtctagcatcggacgactgggaggccgcgatgcaacgcatcatggccctgacgacccgcaaccccgagtcctttagacaacagccgcaggccaacagactttcggctattctggaggcggtggtcccctctcggaccaaccccacgcacgagaaggtgctggcgatcgtgaacgcgctggcggaaaacaaggccatccgtcccgacgaggccgggctggtgtacaacgccctgctggagcgcgtgggccgctacaacagcacgaacgtgcagtccaacctggaccggctggtgacggacgtgcgcgaggccgtggcgcagcgcgagcggttcaagaacgagggcctgggctcgttggtggcgctgaacgccttcctggcgacgcagccggcgaacgtgccgcgcgggcaggacgattataccaactttatcagcgcgctgcggctgatggtgaccgaggtgccccagagcgaggtgtaccagtcgggcccggactactttttccagactagcagacagggcctgcagacggtgaacctgagccaggctttcaagaatctgcgcgggctgtggggcgtgcaggcgcccgtgggcgaccggtcgacggtgagcagcttgctgacgcccaactcgcggctgctgctgctgctgatcgcgcccttcaccgacagcggcagcgtgaaccgcaactcgtacctgggtcacctgctgacgctgtaccgcgaggccataggccaggcgcaggtggacgagcagaccttccaggagatcactagtgtaagccgcgcgctgggtcagaacgacaccgacagtcttagagccaccctgaacttcttgctgacaaatagacagcagaagattccggcgcagtacgcgctgtcggccgaggaggagcgcatcctgagatatgtgcagcagagcgtagggcttttcctgatgcaggagggggccacccccagcgccgcgctggacatgaccgcgcgcaacatggaacctagcatgtacgccgccaaccggccgtttatcaataagctgatggactacctgcaccgcgcggcgtccatgaactcggactactttaccaatgccattttgaacccgcactggctcccgccgccggggttctacacgggcgagtacgacatgcctgaccccaacgacgggtttttgtgggacgacgtggacagcgcggtgttctcaccgaccttgcaaaagcgccaggaggcggtgcgcacgcccgcgagcgagggcgcggtgggtcggagcccctttcctagcttagggagtttgcatagcttgccgggctcggtgaacagcggcagggtgagccggccgcgcttgctgggcgaggacgagtacctgaacgattcgctgctgcagccgccgcgggtcaagaacgccatggccaataacgggatagagagtttggtggacaaactgaaccgctggaagacctacgctcaggaccatagggagcctgcgcccgcgccgcggcgacagcgccacgaccggcagcggggcctggtgtgggacgacgaggactcggccgacgatagcagcgtgttggacttgggcgggagcggtggggtcaacccgttcgcgcatctgcagcccaaactggggcggcggatgttttgaatgcaaaataaaactcaccaaggccatagcgtgcgttctcttccttgttagagatgaggcgtgcggtggtgtcttcctctcctcctccctcgtacgagagcgtgatggcgcaggcgaccctggaggttccgtttgtgcctccgcggtatatggctcctacggagggcagaaacagcattcgttactcagagctggctccgctgtacgacaccactcgcgtgtacttggtggacaacaagtcggcggacatcgcttccctgaactaccaaaacgaccacagcaacttcctgaccacggtggtgcagaacaacgatttcacccccgccgaggccagcacacaaacaataaattttgacgagcggtcgcggtggggcggtgatctgaagaccattctgcacaccaacatgcccaatgtgaacgagtacatgtttaccagcaagtttaaggcgcgggtgatggtggctagaaaaaaggcggaaggggctgatgcaaatgataggagcaaggatatcttagagtaccagtggtttgagtttaccctgcccgagggcaacttttccgagaccatgaccatagacctgatgaacaacgccatcttggaaaactacttgcaagtggggcggcaaaatggcgtgctggagagcgatattggagtcaagtttgacagcaggaatttcaagctgggctgggacccggtgaccaagctggtgatgccaggggtttacacctatgaggccttccacccggacgtggtgctgctgcctggctgcggggtggacttcaccgagagccgcctgagcaacctcctgggcattcgcaagaagcaacctttccaagagggcttcagaatcatgtatgaggatctagtagggggcaacatccccgccctcctgaatgtcaaggagtatctgaaggataaggaagaagctggcacagcagatgcaaataccattaaggctcagaatgatgcagtcccaagaggagataactatgcatcagcggcagaagccaaagcagcaggaaaagaaattgagttgaaggccattttgaaagatgattcaaacagaagctacaatgtgatcgagggaaccacagacaccctgtaccgcagttggtacctgtcctatacctacggggaccccgagaagggggtgcagtcgtggacgctgctcaccaccccggacgtcacctgcggcgcggagcaagtctactggtcgctgccggacctcatgcaagaccccgtcaccttccgctctacccagcaagtcagcaactaccccgtggttggcgccgagctcatgcccttccgcgccaagagcttttacaacgacctcgccgtctactcccagctcatccgcagctacacctccctcacccacgtcttcaaccgcttccccgacaaccagatcctctgccgcccgcccgcgcccaccatcaccaccgtcagtgaaaacgtgcctgctctcacagatcacgggacgcttccgctgcgcagcagtatccgcggagtccagcgagtgaccgtcactgacgcccgtcgccgcacctgtccctacgtctacaaggccctgggcatagtcgcgccgcgcgtgctttccagtcgcaccttctaaaaaatgtctattctcatctcgcccagcaataacaccggctggggtcttactaggcccagcaccatgtacggaggagccaagaagcgctcccagcagcaccccgtccgcgtccgcggccacttccgcgctccctggggcgcttacaagcgcgggcggacttctaccgccgccgccgtgcgcaccaccgtcgacgatgtcatcgactcggtggtcgccgatgcgcgcaactatacccccgccccctccaccgtggacgcggtcatcgacagcgtggtggccgacgcgcgcgactatgccagacgcaagagccggcggcgacgaatcgccaggcgccaccggagtacgcccgccatgcgcgccgcccgggctctgctgcgccgcgccagacgcacgggccgccgggccatgatgcgagccgcgcgccgcgccgccactgcaccccccgcaggcaggactcgcagacgagcggccgccgccgccgccgcggccatttctagcatgaccagacccaggcgcggaaacgtgtactgggtgcgcgactccgtcacgggcgtgcgcgtgcccgtgcgcacccgtcctcctcgtccctgatctaatgcttgtgtcctcccccgcaagcgacgatgtcaaagcgcaaaatcaaggaggagatgctccaggtcgtcgccccggagatttacggacccccggaccagaaaccccgcaaaatcaagcgggttaaaaaaaaggatgaggtggacgagggggcagtagagtttgtgcgcgagttcgctccgcggcggcgcgtaaattggaaggggcgcagggtgcagcgcgtgttgcggccaggcacggcggtggtgttcacgcccggcgagcggtcctcggtcaggagcaagcgtagctatgacgaggtgtacggcgacgacgacatcctggaccaggcggcggagcgggcgggcgagttcgcctacgggaagcggtcgcgcgaagaggagctgatctcgctgccgctggacgaaagcaaccccacgccgagcctgaagcccgtgaccctgcagcaggtgctgccccaggcggtgctgctgccgagccgcggggtcaagcgcgagggcgagagcatgtacccgaccatgcagatcatggtgcccaagcgccggcgcgtggaggacgtgctggacaccgtgaaaatggatgtggagcccgaggtcaaggtgcgccccatcaagcaggtggcgccgggcctgggcgtgcagaccgtggacattcagatccccaccgacatggatgtcgacaaaaaaccctcgaccagcatcgaggtgcagaccgacccctggctcccagcctccaccgctaccgtctccacttctaccgccgccacggccaccgagcctcccaggaggcgaatatggggcgccgccagccggctgatgcccaactacgtgttgcatccttccatcatcccgacgccgggctaccgcggcacccggtactacgccagccgcaggcgcccagccagcaaacgccgccgccgcaccaccacccgccgccgtctggcccccgcccgcgtgcgccgcgtaaccacgcgccggggccgctcgctcgttctgcccaccgtgcgctaccaccccagcatcctttaatccgtgtgctgtgatactgttgcagagagatggctctcacttgccgcctgcgcatccccgtcccgaattaccgaggaagatcccgccgcaggagaggcatggcaggcagcggcctgaaccgccgccggcggcgggccatgcgcaggcgcctgagtggcggctttctgcccgcgctcatccccataatcgccgcggccatcggcacgattccgggcatagcttccgttgcgctgcaggcgtcgcagcgccgttgatgtgcgaataaagcctctttagactctgacacacctggtcctgtatatttttagaatggaagacatcaattttgcgtccctggctccgcggcacggcacgcggccgttcatgggcacctggaacgagatcggcaccagccagctgaacgggggcgccttcaattggagcagtgtctggagcgggcttaaaaatttcggctcgacgctccggacctatgggaacaaggcctggaatagtagcacggggcagttgttaagggaaaagctcaaagaccagaacttccagcagaaggtggtggacgggctggcctcgggcattaacggggtggtggacatcgcgaaccaggccgtgcagcgcgagataaacagccgcctggacccgcggccgcccacggtggttgagatggaagatgcaactcttccgccgcccaagggcgaaaagcggccgcggcccgacgcggaggagacgatcctgcaggtggacgagccgccctcgtacgaggaggccgtgaaggccggcatgcccaccacgcgtatcatcgcgccgctggccacgggtgtaatgaaacccgccacccttgacctgcctccaccacccacgcccgctccaccgaaggcagctccggttgtgcaggcccccccggtggcgaccgccgtgcgccgcgtccccgcccgccgccaggcccagaactggcagagcacgctgcacagtatcgtgggcctgggagtgaaaagtctgaagcgccgccgatgctattgagagagaggaaagaggacactaaagggagagcttaacttgtatgtgccttaccgccagagaacgcgcgaagatggccaccccctcgatgatgccgcagtgggcgtacatgcacatcgccgggcaggacgcctcggagtacctgagcccgggtctggtgcagtttgcccgcgccaccgacacgtacttcagcctgggcaacaagtttaggaaccccacggtggctcccacccacgatgtgaccacggaccggtcccagcgtctgacgctgcgcttcgtgcccgtggatcgcgaggacaccacgtactcgtacaaggcgcgcttcactctggccgtgggcgacaaccgggtgctagacatggccagcacttactttgacatccgcggcgtcctggaccgcggtcccagcttcaaaccctactcgggcacggcctacaacagtctggcccccaagggcgcccccaactccagtcagtgggaacagaaaaaggccaatgctggagatcaaaaggaaacacatacttatggtgtagctcctatgggtggagaaaacattacaattagcggtttgcaaattggaacagatactacaaatggcaaacaagacccgatatatgctaataagctgtatcaaccagagcctcaagtaggagaagaaaactggcaggaaacagaagccttctatggaggaagggctcttaaaaaggaaaccaagatgaaaccatgctatggctcatttgccagacccacaaatgaaaaaggaggacaggcaaaactaagagaccctgaaaaaagtcaagaagattttgacatagacctagcattctttgatactccgggaggaactttaacaggtggtggaacggaatacaaagcagacattgttatgtgcactgaaaatgttaatcttgaaaccccggacacccacgtggtgtataaaccaggcaaagatgatgacagttcagaaatcaacttggttcagcagtccatgcccaacagacctaactacatcggcttcagggacaactttgtgggtctcatgtactacaacagcactggcaacatgggtgtgctggccggtcaggcttctcagttgaatgctgtggtcgacttgcaagacagaaacacagagctgtcttaccagctcttgctagattctctgggcgacagaaccaggtactttagcatgtggaactctgcggtggacagctatgatcccgatgtcaggatcattgagaatcacggtgtggaagatgaacttcccaactattgcttcccattggatgggtctggcaccaatgctgcttatgaaggtgtaaaagttaaaaatggagaagatggggatcaagagagcgaatgggaaaaagacaccaatgtggcagatcgaaaccaaatatgcaagggcaacatctacgccatggagatcaacctccaggccaacctgtggaagagttttctgtactcgaatgtggccctgtacctgcctgactcctacaagtacacgccggccaacgtcacgctgcccgccaacaccaacacctacgagtacatgaacggccgcgtggtagccccctcgctggtggacgcctacatcaacatcggcgcccgctggtcgttggaccccatggacaacgtcaaccccttcaaccaccaccgcaatgcgggcctgcgctaccgctccatgcttctgggcaacggccgctacgtgcccttccacatccaagtgccccaaaagttctttgccatcaagaacctgctcctgctcccgggctcctacacctacgagtggaacttccgcaaggacgtcaacatgatcctgcagagttccctcggaaacgatctgcgcgtcgacggcgcctccgtccgcttcgacagcgtcaacctctacgccaccttcttccccatggcgcacaacaccgcctccaccctggaagccatgctgcgcaacgacaccaacgaccagtccttcaacgactacctctcggccgccaacatgctctaccccatcccggccaaggccaccaacgtgcccatctccatcccctcgcgcaactgggccgccttccgcggctggagtttcacccggctcaagaccaaggaaactccctccctcggctcgggtttcgacccctactttgtctactcgggctccatcccctatctcgacgggaccttctacctcaaccacaccttcaagaaggtctccatcatgttcgactcctcggtcagctggcccggcaacgaccggctgctcacgccgaacgagttcgagatcaagcgcagcgtcgacggggagggctacaatgtggcccaatgcaacatgaccaaggactggttcctcgtccagatgctctcccactacaacatcggttaccagggcttccatgtgcccgagggctacaaggaccgcatgtactccttcttccgcaacttccagcccatgagcaggcaggtggtcgatgagatcaactacaaggactacaaggccgtcaccctgcccttccagcacaacaactctggcttcaccggctacctcgcacccaccatgcgtcaggggcagccctaccccgccaacttcccctacccgctcatcggccagacagccgtgccatccgtcacccagaaaaagttcctctgcgacagggtcatgtggcgcatccccttctccagcaacttcatgtccatgggcgcccttaccgacctgggtcagaacatgctctacgccaactcggcccacgcgctcgacatgacctttgaggtggaccccatggatgagcccaccctcctctatcttctcttcgaagttttcgacgtggtcagagtgcaccagccgcaccgcggcgtcatcgaggccgtctacctgcgcacgcccttctccgccggcaacgccaccacctaagcatgagcggctccagcgaacgagagctcgcggccatcgtgcgcgacctgggctgcgggccctactttttgggcacccacgacaagcgcttcccgggctttctcgccggcgacaagctggcctgcgccatcgtcaacacggccggccgcgagaccggaggcgtgcactggctcgcctttggctggaacccgcgctcgcgcacctgctacatgttcgacccctttgggttctcggaccgccggctgaagcagatttacagcttcgagtacgaggccatgctacgccgcagcgccctggcctcctcgcccgaccgctgtctcagcctcgagcagtccacccagaccgtgcaggggcccgactccgccgcctgcggacttttctgttgcatgttcttgcatgccttcgtgcactggcccgaccgacccatggacggaaaccccaccatgaacttgctgacgggggtgcccaacggcatgctacaatcgccacaggtgctacccaccctccggcgcaaccaggagcagctctaccgcttcctcgcgcgccactccccttactttcgatcccaccgcgccgccatcgaacacgccaccgcttttgataaaatgaaacaactgcgtgtatctcaataaacagcacttttattttacatgcactggagtatatgcaagttatttaaaagtcaaaggggttctcgcgctcgtcgttgtgcgccgcgctggggagggccacgttgcggtactggtacttgggctgccacttgaactcggggatcaccagtttgggcactggggtctcggggaaggtctcgctccacatgcgccggctcatctgcagggcgcccagcatgtccgggccggagatcttgaaatcgcagttggggccggtgctttgcgcgcgcgagttgcggtacacggggttgcagcactggaacaccatcagactggggtacttcacactggcaagcacgctcttgtcgctgatctgatccttgtccaggtcctcggcgttgctcaggccgaacggggtcatcttgcacagctggcggcccaggaagggcacgctctgaggcttgtggttacactcgcagtgaacgggcattagcatcattcccgcgccgcgctgcatattcgggtagagggccttgacaaaggccgcgatctgcttgaaagcttgctgggccttggccccctcgctgaaaaacaggccgcagctcttcccgctgaactggttattcccgcatccggcatcctgcacgcagcagcgcgcgtcatggctggtcagttgcaccacgctccggccccagcggttctgggtcaccttggccttgctgggttgctccttcaacgcgcgctgcccgttctcactggtcacatccatctccaccacgtggtccttgtggatcatcaccgttccatgcagacacttgagctgaccttccacctcggtgcagccgtggtcccacagggcgcagccggtgcactcccagttcttgtgcgcgatcccgctgtggctgaagatgtaaccttgcaacatgcggcccattatggtgctaaaggttttctgagtggtgaaggtcagttgcagaccgcgggcctcctcgttcatccaggtctggcacatcttttggaagatctcggtctgctcgggcatgagcttgtaagcatcgcgcaggccgctgtcgacgcggtaacgttccatcagcacgttcatggtatccatgcccttctcccaggacgagaccagaggcagactcagggggttgcgcacgttcaggacaccgggtgtcgcgggctcgacgatgcgttttccgtccttgccttccttcaacagaaccggcggctggctgaatcccactcccacgatcacggcatcttcctggggcatctcttcgtcggggtctaccttggtcacatgcttggtcttcctggcttgcttcttttttggagggctgtccacgggaaccacgtcctcctcggaagacccggagcccacccgctgatactttcggcgcttggtgggcagaggaggtggtggcggcgaggggctcctctcctgctccggcggatagcgcgccgacccgtggccccggggcggagtggcctctcgctccatgaaccggcgcacgtcctgactgccgccggccattgtttcctaggggaagatggaggagcagccgcgtaagcaggagcaggaggaggacttaaccacccacgagcaacccaaaatcgagcaggacctgggcttcgaagagccggctcgtctagaacccccacaggatgaacaggaggagaccgacgctgggctcgagcatggctacctgggaggagaggaggatgtgctgctgaaacacctgcagcgccagtccatcatcctccgggacgccctggccgaccggagcgaaacccccctcagcgtcgaggagctaagtagggcctacgagctcaacctcttctcgccgcgcgtgccccccaaacgccagcccaacggcacatgcgagcccaacccgcgtctcaacttctaccccgtctttgcggtccccgaggccctcgccacctatcacatctttttcaagaaccaaaagatccccgtctcctgccgcgccaaccgcacccgcgccgacgcgctcctcgctttggggcccggcgcgcgcatacctgatatcgcttccctggaagaggtgcccaagatcttcgaagggctcggtcgggacgagacgcgcgcggcgaacgctctgaaagaaacagcagaggaagagggtcacactagcgccctggtagagttggaaggcgacaacgccaggctggccgtgctcaagcgcagcgtcgagcttacccacttcgcctaccccgccgtcaacctcccgcccaaggtcatgcgtcgcatcatggatcagctcatcatgccccacatcgaggccctcgatgaaagtcaggagcagcgccccgaggacgcccggcccgtggtcagcgacgagatgctcgcgcgctggctcgggacccgcgacccccaggctttggaacagcggcgcaaactcatgctggccgtggtcctggtcacccttgagctcgaatgcatgcgccgctttttcagcgaccccgagaccctgcgcaaggtcgaggagaccctgcactacactttcaggcacggtttcgtcaggcaggcctgcaagatctccaacgtggagctgaccaacctggtctcctgcctggggatcctgcacgagaaccgcctgggccagaccgtgctccactctaccctgaagggcgaggcgcggcgggactatgtccgcgactgcgtctttctctttctctgccacacatggcaagcggccatgggcgtgtggcagcagtgtctcgaggacgagaacctaaaggagctggacaagcttcttgctagaaaccttaaaaagctgtggacgggcttcgacgagcgcaccgtcgcctcggacctggccgagatcgtcttccccgagcgcctgagacagacgctgaaaggcgggctgcccgacttcatgagccagagcatgttgcaaaactaccgcactttcattcttgagcgatcaggcatcctgcccgccacctgcaacgccttcccctccgactttgtaccgctgagctaccgcgagtgtcccccgccgctgtggagccactgctacctcttgcagctggccaactacatcgcctaccactcggacgtgatcgaggacgtgagcggcgaggggctgctcgagtgccactgtcgctgcaacctgtgctccccgcatcgctccctggtctgcaacccccagctcctgagcgagacccaggtcatcggtaccttcgagctgcaaggtccgcaggagtccaccgctccgctgaaactcacgccggggttgtggacttccgcgtacctgcgcaaatttgtacccgaagactaccacgcccatgagataaagttctttgaggaccaatcgcgtccgcagcacgcggatctcacggcctgcgtcatcacccagggcgcgatcctcgcccaattgcacgccatccaaaaatcccgccaagagtttcttctgaaaaagggtagaggggtctacctggacccccagacgggcgaggtgctcaacccgggtctcccccagcatgccgaggaagaagcaggagccgctagtggaggagatggaagaagaatgggacagccaggcagaggaggacgaatgggaggaggagacagaggaggaagaattggaagaggtggaagaggagcaggcaacagagcagcccgtcgccgcaccatccgcgccggcagccccgccggtcacggatacaacctccgctccggtcaagcctcctcgtagatgggatcaagtgaagggtgacggtaagcacgagcggcagggctaccgatcatggagggcccacaaagccgcgatcatcgcctgcttgcaagactgcggggggaacatcgctttcgcccgccgctacctgctcttccaccgcggggtgaacatcccccgcaacgtgttgcattactaccgtcaccttcacagctaagaaaaagcaagtcaaaggagtcgccggaggaggaggaggaggcctgaggatcgcggcgaacgagcccttgaccaccagggagctgaggaaccggatcttccccactctttatgccatttttcagcagagtcgaggtcagcagcaagagctcaaagtaaaaaaccggtctctgcgctcgctcacccgcagttgcttgtaccacaaaaacgaagatcagctgcagcgcactctcgaagacgccgaggctctgttccacaagtactgcgcgctcactcttaaagactaaggcgcgcccacccggaaaaaaggcgggaattacctcatcgccaccatgagcaaggagattcccaccccttacatgtggagctatcagccccagatgggcctggccgcgggcgcctcccaggactactccacccgcatgaactggctcagtgccggcccctcgatgatctcacaggtcaacggggtccgtaaccatcgaaaccagatattgttggagcaggcggcggtcacctccacgcccagggcaaagctcaacccgcgtaattggccctccaccctggtgtatcaggaaatccccgggccgactaccgtactacttccgcgtgacgcactggccgaagtccgcatgactaactcaggtgtccagctggccggcggcgcttcccggtgcccgctccgcccacaatcgggtataaaaaccctggtgatccgaggcagaggcacacagcttaacgacgagttggtgagctcttcaatcggtctgcgaccggacggagtgttccaactagccggagccgggagatcctccttcactccccaccaggcctacctgaccttgcagagcagctcttcggagcctcgctccggaggcatcggaaccctccagttcgtggaggagtttgtgccctcggtctacttcaaccccttctcgggatcgccaggcctctacccggacgagttcataccgaacttcgatgcagtgagagaagcggtggacggctacgactgaatgtcccatgctgactcggctgagctcgctcggttgaggcatctggaccactgccgccgcctgcgctgcttcgcccgggagagctgcggactcatctactttgagtttcccgaggagcaccccaacggccctgcgcacggagtgcggatcaccgtagagggcaccgccgagtctcacctggtcaggttcttcacccagcaacccttcctggtcgagcgggaccggggcgccaccacctacaccgtctactgcatctgtcctaccccgaagttgcatgagaatttttgttgtactctgtgtgctgagtttaataaaagctaaactcctacaatactctgggatcccgtgtcgtcgcactcgcaacgagatcttcaacctcaccaaccagactgaggtaaaactcaactgcagaccggggggcaaatacatcctctggctctttgaaaacacttccttcgcagtctccaacgcctgcgccaacgacggtattgaaatacccaacaaccttaccagtggactaacttacactaccagaaagactaagctagtactctacaatccttttgtagagggaacctaccactgccagagcggaccttgcttccacactttcactttggtgaacgttaccgacagcagcacagtcgctccagaaacatctaacctttttgatactaacactcctaaaaccggaggtgagctctgggttccctctttaacagaggggggtaaacatattgaagcggttgggtatttgattttaggggtggtcctgggtgggtgcatagcggtgctgtattaccttccttgctggatcgaaatcaaaatctttatctgctgggtcatacattgttgggaggaaccatgaaggggctcttgctgattatcctttccctggttgggggtgtactgtcatgccacgaacagccacgatgtaacatcaccacaggcaatgagaggagtgtgatatgcacagtagtcatcaaatgcgagcatgcatgtcctctcaacatcacattcaagaataagaccatgggaaattcatgggtgggcgattgggaaccaggagatgagcagaactacacggtcactgtccatggtagcgatgggaatcacactttcggtttcaaattcatttttgaagtcatgtgtgatatcacactgcatgtggctagacttcatggcttgtggccccctaccaaggagaacatggttgggttttctttggcttttgtgatcatggcctgctttatgtcaggtctgctggtaggggctttagtatggttcctgaagcacaagcctaggtatggaaatgaggagaaggaaaaattgctataaatctttttctcttcgcagaaccatgaatactttgaccagtgtcgtgctgctctctcttcttgtagcttttagtcaggcaggatttcatactatcaatgctacatggtgggctaatgtaactttagtgggaccctcagatacgccagtcacatggtatgataaacagggaatgcagttctgtgatggaaatacagttaagaatcctcaaataagacatgagtgtaatgagcaaaaccttacactaattcatgtgaacaaaacccatgaaaggacatacatgggttataatagacagagtactcataaggaagactataaagtcatagttataccgcctcctcctgctactgtaaagccacagtcaggtccagagtatgtatatgttaatatgggagagaacaaaaccttagttggacctccaggaataccagttacttggtatgacggagaaggaaataaattctgcgatggagaaaaagttgaacatgcagaatttaatcatacatgtgacgagcaaaatcttacactgttgtttataaatcttacacatgatggggcttatcttggctataatcaccagggaactaaaagaacttggtatgaggttgtagtgacagatggttttccaaaatcaggggagatgaaaatcgaagatcagagtagacaaacagaacaaaaacaaaatgagcataaacagggtgggcagaaacaggaggggcaaaaagagacaagtcaaaagaaagataatgacaaacagaaggcgacacacaggaggccatcaaaactaaagccgcacacacctgaagcaaaactgattacagtttctagtgggtctaacttaacattacttgggccagatggaaaggtcacttggtatgatgatgatttaaaaagaccatgcgagcctgggtataagttagggtgtaagtgtgacaatcaaaacctaacgctaatcaatgtaactaaactttatgagggagtttactatggtactaatgacagaggtaacagcaaaagatacagattaaaagtaaacactactaattctcaaagtgtgaaaattcagccatacaacaggtctactactcctgatcagaaacacagatttgaattgcaaattgattctaatcaagacaatgacaaaattccatcaaccactgtggcaatcgtggtgggagtgattgcgggcttcataactataatcattgtcattctgtgctacatctgctgccgcaagcgtcccagggcatacaatcatatggtagacccactacttagcttctcttactgagactcagtcactttcatttcagaaccatgaaggctttcacagcttgcgttctgattagcatagtcacattagtatcagctgattacaaacaagttcaagttagcagaggaggaaatattacattagatggaccattcgataatactacatggacaagatatcataatgatggacataaaaatggttggatgaaaatttgcacatggactggagcaacatataaatgtcacaataatggaagcattactatttttgctttcaacattacatccggagtttacaaagcagaagggtataaaaaagaggttagaacattttcatctagaaatcaaaaacatacaattgaagattctggagattatgaacaacaaaaaatatatctatataatctaacaataattgaagcgccaactactaaagcacccaccacagttagaacaaccacgcagacaactactagggaaacaacacatccaaccaccacagtcagtacaactcacactacacatctagacactacagtgcagaatactactttattgattgggtttttactaagaggaaatgaaagtactactgatcagacagaggctacctcaagtgccttcagcagcactgcaaatttaacttcgcttgcttcggtaaatgaaacgatcgtgccgatgatgtatggccaaccttactcaggtttggatattcaaattacttttctggttgtctgtgggatctttattcttgtggttcttttgtactttgtctgctgcaaagccagagaaaaatctaggaggcccatctacaggccagtaatcggggatcctcagcctctccaagtggaagggggtctaaggaatcttctcttctctttttcagtatggtgattcagccatgattcctaggttcttcctatttaacatcctcttctgtctattcaacgtgtgcgctgccttcgcggccgtctcgcacgcctcgcccgactgtcttgggcccttccccacctaccttctttttgccctgctcacctgcacctgcgtctgcagcattgtctgcctggtcgtcaccttcctgcagctcatcgactggtgctgcgcgcgctacaattatctccaccacagtcccgaatacagggacgagaacgtagccagaatcttaaggctcatttgaccatgcagactctgctcatactgctatccttcctctcccctgccctcgctgatgatgattactctaagtgcaaatttgtggagctatggaatttcttagactgctatgatgctaaaatggatatgccatcctattacttggtgattgtggggatagtcatggtctgctcctgcactttctttgccatcatgatctacccctgttttgatctcggctggaactctgttgaggcattcacatacacactagaaagcagttcactagcttccacgccgccacccacaccgcctccccgcagaaatcagtttcccatgattcagtacttagaagagccccctccccggcccccttccactgttagctactttcacataaccggcggcgatgactgacaaccacctggacctcgagatggacggccaggcctccgagcagcgcatcctgcaactgcgcgtccgtcagcagcaggagcgggccgccaaggagctcctcgatgccatcaacatccaccagtgcaagaagggcatcttctgcctggtcaaacaggcaaagatcacctacgagctcgtgtccggcggcaagcagcatcgcctcgcctatgagctgccccagcagaagcagaagttcacctgcatggtgggcgtcaaccccatagtcatcacccagcagtcgggcgagaccagcggctgcatccactgctcctgcgaaagccccgagtgcatctactccctcctcaagaccctttgcggacttcgcgacctcctccccatgaactgattgattaaagcccaaaaaaccaatcaaaccccttcccattagccccaaataaacaatcattggaaataatcattcaataaagatcacttacttgaaatctgaaagtatgtctctggtgtagttgtttagcagcacctcggtaccctcctcccagctctggtactccagtccccggcgggcggcgaactttctccacaccttgaaagggatgtcaaattcctggtccacaattttcattgttttccctctcagatgtcaaagaggcttcgggtggaagatgacttcaaccccgtctacccctatgactacgcgcggaatcagaatatccccttcctcactcccccctttgtctcctccgatggattccaaaacttcccccctggtgtcctgtcactcaaattggctgacccaatcgctatcaccaatggtgatgtctcactcaaggtgggagggggacttactttacaagatggaaccggaaaactaactatcgacaccaagactcccttgcaagttgcaaataataaattagaacttgcgtttgatgcaccattgtatgaaaaaaatggaaaacttgctttaaaaacaggccatggattagctgttttaaccaaagacattggcataccagaattaattggatcccttgtgatcttaactggaaaaggaattgggacaggtactgttgcaggaggaggaactatagatgtaagactgggtgatgatggaggtttatcatttgataaaaagggtgatctagtagcctggaataaaaaaaatgacaggcgcactttgtggacaacacctgatccatccccaaactgcagagtatcagaagataaagattcaaaactaactttaattcttacaaaatgtggaagtcagatcctagcaagtttttcactgcttgtagtcaaagggacgtatgcaactgttgataaaaatacaactaataaacaatttagcattaaactactgtttgatgcaaatggaaagcttaaaagcgaatcaaaccttagtggttattggaactatagaagtgataatagtgttgttagtactccctatgacaatgcagtgcctttcatgccaaataccacggcttatccaaaaatcattaatagtacaactgatcctgaaaataagaaaagttcggctaaaaaaactattgttggcaatgtctacctagaaggtaatgcgggtcaaccagtagccgttgctattagtttcaataaggaaactactgctgactattcaataacatttgactttgcgtggagcaaagcttatgaaacccctgtgccttttgacacctcctccatgacattctcatatattgcccaggaaaatcaagacaaaggcgaataaagtgttttgaaatgaacttatgtatctttattgatttttacaccagcacgggtagtcagtctcccaccaccagcccatttcacagtgtacacgattctctcagcacgggtggccttaaatagggaaatgttctgattagtgcgggaactggacttggggtctataatccacacagtttcctggcgagccaaacgggggtcggtgattgagatgaagccgtcctctgaaaagtcatccaagcgggcctcacagtccaaggtcacagtctagtggaatgagaagaacgcacagattcatattcggaaaacaggatgggtctgtgcctctccatcagcgccctcagcagtctctgccgccggggctcggtgcggctgctgcagatgggatcgggatcacaagtctctctgactatgatccccacagccttcagcatcagtctcctggtgcgtcgggcacagcaccgcatcctgatctcgctcatgttctcacagtaagtgcagcacataatcaccatgttattcagcagaccataattcagggtgctccagccaaaactcatgttggggatgatggaacccacgtgaccatcgtaccagatgcggcagtatatcaggtgcctgcccctcatgaacacactgcccatatacatgatctctttgggcatgtctctgttcacaatctgacggtaccatgggaaacgctggttgaacatgcacccgtaaatgactctcctgaaccacacggccagcagggtgcctcccgcccgacactgcagggagcccggggatgaacagtggcaatgcaggatccagcgctcgtacccgctcaccatctgagctctcaccaagtccagggtagcggggcacaggcacactgacatacatctttttaaaatttttatttcctctggagtcaagatcatatcccaggggactggaaactcttggagcagggtaaagccagcagcacatggtaatccacggacagaacttacattatgataatctgcatgatcacaatcgggcaacaggggatgttgttcagtcagtgaagccctggtttcctcatcagatcgtggtaaacgggccctgcgatatggatgatggcggagcgagctggattgaatctcggtttgcattgtagtggattctcttgcgtaccttgtcgtacttctgccagcagaaatgggcccttgaacagcagatacccctcctgcggccgtcctttcgctgctgccgctcagtcatccaactgaagtacatccattctcgaagattctggagaagttcctctgcatctgatgaaataaaaaacccgtccatgcgaattcccctcatcacatcagccaggactctgtaggccatccccatccagttaatgctgccttgtctatcattcagagggggcggtggcaggattggaagaaccatttttattccaaacggtctcgaaggacgataaagtgcaagtcacgcaggtgacagcgttccccgccgctgtgctggtggaaacagacagccaggtcaaaacccactctattttcaaggtgctcgaccgtggcttcgagcagtggctctacgcgtacatccagcataagaatcacattaaaggctggccctccatcgatttcatcaatcatcaggttacattcctgcaccatccccaggtaattctcatttttccagccttggattatctctacaaattgttggtgtaagtccactccgcacatgtggaaaagctcccacagtgccccctccactttcataatcaggcagaccttcataatagaaacagatcctgctgctccaccacctgcagcgtgttcaaaacaacaagattcaataaggttctgccctccgccctgagctcgcgcctcaatgtcagctgcaaaaagtcacttaagtcctgggccactacagctgacaattcagagccagggctaagcgtgggactggcaagcgtaagggaaaactttaatgctccaaagctagcacccaaaaactgcatgctggaataagctctctttgtgtctccggtgatgccttccaaaatgtaagtgataaagcgtggtagtttttctttaatcatttgcgtaatagaaaagtcctgtaaataagtcactaggaccccagggaccacaatgtggtagcttacaccgcgtcgctgaagcatggttagtagagatgagagtctgaaaaacagaaagcatgcactaaactaaggtggctattttcactgaaggaaaaatcactctctccagcaacagggtacccactgggtggcccttgcggacatacaaaaatcggtccgtgtgattaaaaagcagcacagtaagttcctgtcttcttccggcaaaaatcacatcggactgggttagtatgtccctggcatggtagtcattcaaggccataaatctgccctgatatccagtaggaaccagcacactcacttttaggtgaagcaataccaccccatgcggaggaatgtggaaagattcagggcaaaaaaaattatatctattgctagtcccttcctggacgggagcaatccctccaggactatctataaaagcatacagagattcagccatagctcagcccgcttaccagtagacagagagcacagcagtacaagcgccaacagcagcgactgactacccactgacccagctccctatttaaaggcgccttacactgacgtaatgaccaaaggtctaaaaaccccgccaaaaaaaaacacacacgccctgggtgtttttcgcgaaaacacttccgcgttctcacttcctggtatcgatttggtgacttaacttccgggttcccacgttacgtcacttctgcccttacatgtaactcagtcgtagggcgccatcttgcccacgtccaaaatggattccatgtccagccacgcctccgcggcgaccgttagccgtgcgtcgtgacgtcatttgcatcaacgtttctcggccaatcagcagtagccccgccctaaatttaaaacctcatttgcatattaacttttgtttactttgtggggtatattattgatgatg

SEQ ID NO: 31 - DNA, 35993 bp, Adenovirus E4
  MISC_FEATURE (1)..(35993): Complete Genome
atcatcaataatataccttattttttttgtgtgagttaatatgcaaataaggcgtgaaaatttggggatggggcgcgctgattggctgtgacagcggcgttcgttaggggcggggcaggtgacgttttgatgacgcgactatgaggaggagttagtttgcaagttctggtggggaaaagtgacgtcaaacgaggtgtggtttaaacacggaaatactcaattttcccacgctgtctaacaggaaatgaggtgtttttgggcggatgcaagtgaaaacggaccattttcgcgcgaaaactgaatgaggaagtgaaatctgagtaatttagtgtttatgacagggaggagtatttgccgagggccgagtagactttgaccgtttacgtgggggtttcgattaccgtgtttttcacctaaagttccgcgtacggtgtcaaagtccggtgtttttacgtaggtgtcagctgatcgtcagggtatttaaacctgcgctctgcagtcaagaggccactcttgagtgccagcgagaagagttttctcctccgcgccgcgagtcagatctacactttgaaatatgaggcacctaagagacctgcccgatgaggaaattatcatcgcttccgggagcgagattctggaactggtggtaaatgctatgatgggcgacgaccatccggaaccccccaccccatttgagacaccttcgctgcacgatttgtatgatctggaggtggatgtgcccgaggacgaccccaacgagaaggcggtaaatgatttatttagcgatgccgcgctgctagctgccgaggaggcttcaagccctagctcagacagcgactcttcactgcatacccctagacacgacagaggtgagaaagagatccccgggcttaaatgggaaaagatggacttgcgttgctatgaggaatgcctgcccccaagcgatgatgaggacgagcaggcgattcagaacgcagcgagccatggagtgcaagccgtcagcgagagctttgcactggactgcccgcctttgcccggacacggctgtaagtcttgtgaatttcatcgcatcaatactggagataaagctgtgttatgtgcactttgctatatgagagcgtacaaccattgtgtttacagtaagtgtgattaagtgaactttaaagggaggcaaagagtagggtgactgggtgatgactggtttatttatgtatatctgttttttatataggtcccgtttctgacgcagatgatgagacccccactacagagtccactttgtcaccccctgaaattggcacgtctccatctgacaatattgttagaccagttcctgtaagagccactgggaggagagcagctgtagaatgtttggatgatttgcttcagggtggagatgaacctttggacttgtgtacccggaaacgccccaggcattaagtgccacacatgtgtgtttacttgaggtgatgtcagtatttatagggtgtggagtgcaataaaatatgtgttgactttaagtgcgtggtttatgactcaggggaggggactttgggtatataagcaggtgcagacctgtgtggttagctcagagcggtatggagatttggacggttttggaagactttcacaagactaggcagctgctagagaacgcctcgaacggagtctcttacctgtggagattctgcttcggcggtgacctagctaagctagtctatagggccaaacaggattatagggaacaatttgaggatattttgagagagtgtcctggtctttttgacgctcttaacttgggccatcagtctcactttaaccagagaatttcaagagcccttgactttactactcctggcagaaccactgcagcagtagccttttttgcttttatttttgacaaatggagtcaagaaacccatttcagcagggattaccagctggatttcttagcagtagctttgtggagaacatggaagtgccagcgcctgaatgcaatctccggctacttgccggtacagccgctagacactctgaggatcctgagtctccagcagcaggaggatcaagaagagaatccgagagccggcctggaccctccggcggaggagtagctgacctgtttcctgaactgcaccgggtgctgactaggtcttcgagtggtcgggagaggggtattaagcgggagaggcatgatgagactaatcacagaattgaactgactgtgggtctgatgagccgcaagcgtccagaaacagtgtggtggtatgaggtgcagtcaactggcacagatgaggtgtcagtcatgcatgagagattttccctagaacaagtcaagacttgttggttggagcctgaggatgattgggaggtagccatcaggaattatgccaagctggctctgaggccagatagaaagtacaagattactaagctgataaatatcagaaatgcctgctacatctcagggaatggggctgaagtggagatctgtctccaggatagagtggctttcagatgctgcatgatgaatatgtacccgggagtggtggacatggatggggtcacctttatgaacatgaggttcaggggagatgggtataatgggacggtctttatggccaataccaagctgacagtgcatggatgctccttctttgggtttaataacacctgcatcgaggcttggggtcaggtcggtgttaaggggtgcagtttttcagccaactggatgggggtagtgggcaggaccaagagtatgctgtctgtgaagaaatgcttgtttgagaggtgccacctgggggtgatgagcgagggcgaagccagaatccgccactgtgcctctaccgagacgggctgttttgtgctgtgcaagggcaatgccaagatcaagcataatatgatctgtggagcctcggacgagcgcggctaccagatgctgacctgcgccggtgggaacagtcatatgctggccgccgtgcatgtggcttcccattcccgcaagccctggcctgagttcgagcacaatgtcatgaccaggtgcaatatgcatctgggggctcgccgaggcatgtttatgccctaccagtgcaacctgaattatgtaaaggtgctcctggagcccgatgtcatgtccagagtgagcctgacgggggtgtttgacatgaatgtggaagtgtggaagattctaagatatgatgaatacaagaccaggtgtcgagcctgcgagtgcggagggaagcatgccaggttccagcccgtgtgtgtggatgtgacggaggacctgcgacccgatcatttggtgttgtcctgcaccgggacggagttcggctccagtggggaagaatctgactagagtgagtagtgttttggggagggagaggacctgcataaggggcagaatgattaaaatctgtgcttttctgtgtgttgcagcagcatgagcggaaacggctcctttgagggaggggtattcagcccttatctgacggggcgtctcccctcctgggcgggagtgcgtcaaaatgtgatgggatccacggtggacggccggcccgtacagcccgcgaactcttcaaccctgacctatgcaaccctgagctcctcgtcggtggacgcagctgccgccgcagctgctgcttctgccgccagcgccgtgcgcggaatggccatgggcgccggctattacggcactctggtggccaactcgagttccactaataatcccgccagcctgaacgaggagaagctgctgctgttgatggcccagctcgaggccttgacccagcgcctgggcgagctgacccagcaggtggctcagctgcaggagcagacgcgggccgcggttgccacggtgaaatccaaataaaaaatgaatcaataaataaacggagacggttgttgattttaaaaatcagagtctgaatctttatttgatttttcgcgcacggtaggccctggaccaccggcctcgatcattgagcacccggtggatcttttccaagacccggtagaggtgggattggatattgaggtacatgggcatgagcccgtcccgggggtgaaggtagctccattgcagggcctcgtgctcgggggtggtgttgtaaatcacccagtcatagcagggacgcagggcgtggtgttgcacaatatctttgaggaggagactgatggccacgggcagccctttggtgtaggtgtttacaaacctgttgagctgggagggatgcatgcggggggagatgaggtgcatcttagcctggatcttcagattggcgatgttaccgcccagatcccgcctgggattcatgttgtgcaggaccaccagcacggtgtatccggtgcacttggggaatttgtcatgcaacttggaagggaaggcatgaaagaatttggagacgcccttgtggccgcccaggttttccatgcactcatccatgataatggctatgggcccgtgggcggcggcttgggcaaagacgtttcgggggtcggacacatcgtagttgtggtcctgggtgagatcttcataggccattttaatgaatttggggcggagggtgcccgattgggggacgaaggtaccctcaatcccgggggcgtagtttccctcacagatctgcatctcccaggccttaagctccgagggggggatcatgtccacctgcggggcgataaagaaaacggtttccggggcgggggagatgagctgggcggaaagcaggttgcggagtagctgggacttaccgcagccggtggggccgtagataaccccaatgaccggctgcaggtggtagttgagggagacacagctgccgtcctccctaagaaggggggccacctcgttcatcatttggcgcacgtgcatgttctcgcgcaccagttccgccaggagtcgctctccgcccagcgagaggagctcctggagcgaggcgaagtttttcagcggcttgagcccgtcggccatgggcattttggaaagggtctgttgcaggagttccaagcggtcccagagctcggtgatgtgctctacggcatctcgatccagcagacctcctcgtttcgcgggttggggcgactgcgggagtagggcgccagacgatgggcgtccagcgcggccagggtccggtccttccagggtcgcagcgtccgcgtcagggtggtctccgtcacggtaaaggggtgcgcgccgggctgggcgcttgcgagggtgcgcttcaggctcatccggctggtcgagaaccgctcccgatcggcgccctgtgcgtcggccaggtagcaattgaccatgagttcgtagttgagcgcctcggccgcgtggcctttggcgcggagcttacctttggaagtctgcccacaggcgggacagaggagggacttgagggcgtagagcttgggggcgaggaagacggactcgggggcgtaggcgtccgcgccgcagtgggcgcagacggtctcgcactccacgagccaggtgaggtcgggctgattgggatcaaaaaccagttttccgccgttctttttgatgcgtttcttacctctggtctccatgagctcgtgtccccgctgggtgacaaagaggctgtccgtgtccccgtaaaccgactttatgggtcggtcctcgagtgggacgccgcggtcctcgtcgtagaggaaacccgaccactctgagacgaaggcccgggtccaagccagcacgaaggaggccacgtgggagggatagcggtcgttatccaccagcgggtccaccttctccagtgtatgcaaacacatgtccccctcgtccacatccaggaaggtgattggcttgtaagtgtaggccacgtgaccgggggtcccggccgggggggtataaaagggggcgggccgctgctcgtcttcactgtcttccggatcgctgtccaggagcgccagctgttggggtaggtattccctctcaaaggcgggcatgacctccgcactcaggttgtcagtttctagaaacgaggaggatttgatattgacggtgccggcggagatgcctttcaagagcccctcgtccatctggtcagaaaagacaatctttttgttgtcgagtttggtggcgaaggagccgtagagggcgttggagaggagcttggcgatggagcgcatggtctggttcttttccttgtcggcgcgctccttggcggcgatgttgagctgcacgtactcgcgcgccacgcacttccattcggggaagacggtggttagctcgtctggcacgattctgacctgccagccccggttatgcagggtgatgaggtcaacgctggtggccacctcgccgcgcaggggctcgttggtccagcagaggcggccgcccttgcgcgagcagaaggggggcagggggtccagcataagctcgtcgggggggtcagcatcgatggtgaagatgcctggcaggaggtcggggtcgaagtagcttatgcaggtgcccagatcgtccagagaagcttgccattcgcgcacggccagcgcgcgctcgtagggactaaggggcgtgccccagggcatggggtgggtgagcgcggaggcgtacatgccgcagatgtcgtagacgtagaggggctcatcaaggatgccaatgtaggtggggtagcagcggcccccgcggatgctggcgcgcacgtagtcatacaactcgtgcgagggggcgaggagcccggctccgagattggcgcggctgggtttttcggcgcggtagacgatctgacggaagatggcgtgggagttggaggagatggtgggtctttggaagatgttgaagtgggcgtggggcaggccgaccgagtcgcggatgaagtgggcgtaggagtcttgcagcttggcgacaagctcggcggtgacgaggacgtccagggcgcagtagtcaagggtctcttggatgatgtcatacttgagctggcccttttgtttccacagctcgcggttgagaaggaactcttcgcggtccttccagtactcttcaagggggaacccgtcctggtcggcacggtaagagcctagcatgtagaactggttaacggccttgtaggcgcagcagcccttctccacggggagggcataggcctgggcggccttgcgcagggaggtgtgcgtgagggcgaaggtgtccctgaccatgacctttaggaactggtgcttgaagtcgatatcgtcgcagcccccctgctcccagagctggaagtccgtgcgcttcttgtaggcggggttgggcaaagcgaaagtaacatcgttgaagaggatcttgcccgcgcggggcataaagttgcgagtgatgcggaaaggctggggcacctcggcccggttgttgatgacctgggcggcgagcacgatctcgtcgaagccgttaatgttgtggcccacaatgtatagttccacgaaccgcgggcggcccttgacgtggggcagtttcttgagctcctcgtaggtgagctcgtcggggtcgctgagcccgtgctgctcgagggcccagtcggcgagatgggggttggcgcggaggaaggaagtccagagatccacggccagggcggtttgcagacgatcccggtactggcggaactgctgacccacggccattttttcgggggtgacgcagtagaaggtgcgggggtcgccgtgccaacggtcccattttagctggagggcgagatcaagggcgagctcaacgagccggtcgtccccggagagtttcatgaccagcatgaaggggacgagctgcttgccgaaggaccccatccaggtgtaggtttccacatcgtaggtgaggaagagcctttcggtgcgaggatgcgagccgatggggaagaactggatctcctgccaccagttggaggaatggctgttgatgtgatggaagtagaaatgccgacggcgcgccgaacattcgtgcttgtgtttatacaagcggccacagtgctcgcaacgctgcacgggatgcacgtgctgcacgagctgtacctgggttcctttgacgaggaatttcagtgggaagtggagtcgtggcgcctgcatctggtgctgtactacgtcgtggtggtcggcctggccctcttctgcctcgatggtggtcatgctgacgagcccgcgcgggaggcaggtccagacctcggcgcgaacgggtcggagagcgaggacgagggcgcgcaggccggagctgtccagggtcctgagacgctgcggagtcaggtcagtgggcagcggcggcgcgcggttgacttgcaggagtttttcaagggcgcgcgggaggtccagatggtacttgatctccaccgcgccgttggtggcgacgtcgatggcttgcagtgtcccgtgcccctggggagtgaccaccgtcccccgtttcttcttggcgggcggaagcggtttggcttccatggttaaaagcggcggcgaggacgcgcgccgggcggtaggggcggctcgggacccggaggcagtggtggcaggggcacgtcggcgccgcgcgcgggcaggttctggtactgcgcccggagaagactggcgtgagcgacgacgcgacggttgacgtcctggatctgacgcctctgggtgaaggccacgggacccgtgagtttgaacctgaaagacagttcgacagaatcaatctcggtatcattgacggcggcctgccgcagaatctcttgcacgtcgcccgagttgtcctggtaggcaatctcggtcatgaactgctcgatctcctcctcctgaaggtctccgcggccggcgcgctccacggtggccgcgaggtcgttggagatgcggcccatgagctgcgagaaggcgttcatgcccgcctcgttccagacgcggctgtaaaccacggcgccctcgggatcgcgggcgcgcatgaccacctgggcgaggttgagctccacgtggcgcgcaaaaaccgcgtagttgcagaggcgctggtagaggtagttgagcgtggtggcaatgtgctcagtgacaaagaagtacataatccagcggcggagcggcatttcgctgacgtcgcccagggcttccaagcgctccatggcctcgtaaaagtccacggcgaagttgaaaaactgggagttgcgtgcagatacggtcaagtcctcctccagaagacggatgagctcggcgatggtggcgcgcacctcgcgctcgaaggctcccgggagttcctccacttcctcctcttcatccactaacatctcttctacttcctcctcaggcggtggtggcgggggagggggcctgcgtcgccggcggcgcacgggcagacggtcgatgaaacgctcgatggtctcgccgcgccggcgtcgcatggtctcggtgacggcgcgcccgtcctcgcggggtcgcagcgtaaagacgccgccgcgcatctccaggtggcccggggggtccccgttgggcagggagagtgcgctgacgatgcatcttatcaattgccccgtagggactccgcgcaaggacctaagcgtctctagatccacgggatctgaaaaccgttgaacgaaggcttcgagccagtcgcagtcgcaaggtaggctgagcacggtttcttctggcggcggtggggtgtgggcgggggcgatgctgctggtgatgaagttgaaataggcggttctgagacggcggatggtggcgaggagcaccaggtctttgggcccggcttgctggatgcgcagacggtcggccatgccccaggcgtggtcctgacacctggccaggtccttgtagtagtcctgcatgagccgctccacgggcacctcctcctcgcccgcgcggccgtgcatacgcgtgagcccaaacccgcgctgcggctggacgagcgccaggtcagcgacgacgcgctcggcgaggatggcctgctggatctgggtgagggtggtctggaagtcgtcaaagtcgacgaagcggtggtaggctccggtgttaatggtgtaggagcagttggccatgacggaccagttgacagtctggtgaccgggccgcgcgagctcgtggtacttgaggcgcgagtaggcgcgcgagtcgaagatgtagtcgttgcaggtgcgcaccaggtactggtagccgatgaggaagtgcggcggcggctggcggtagagcggccatcgctcggtggcgggggcgccgggcgctaggtcctcgagcatggtgcggtggtagccgtagatgtaccttgacatccaggtgatgccggcggcggtggtggaggcgcgagggaactcgcggacgcggttccagatgttgcgcagcggcaggaagtagttcatggtgggcacggtctggcccgtgaggcgcgcgcagtcgttgatgctctagacatacgggcaaaaacgaaagcggtcagcggctcgactccgtggcctggaggctaagcgaacgggttgggctgcgcgtgtaccccggttcgaatctcgaatcaggctggagccgcagctaacgtggtactggcactcccgtctcgacccaggcctgcacaaaacctccaggatacggaggcgggtcgttttgcaaatttttggcggtcgaaaaaagctagtaagcgcggaaagcggccgaccgcaatggctcactgccgtagattggagaagaatcgccagggttgcgttgcggtgtgccccggttcgagaccgctcgggtcggccgaattccgcggctaacgagggcgtggctgccccgtcgtttccaagaccccataagccagccgacttctccagttacggagcgagcccctcttttgttttgttttttgccagatgcatcccgtactgcggcagatgcgcccccaccctccaccgcaacagcagccccctcctacgcaacagccggcgcttctgcctccgccccagcagcagcaacttccagccactaccgccgcggccgccgtgagcggggccgggcagagtcagtatgacctggctttggaagagggcgaggggctggcgcgcctgggggcgtcgtcgccggagcggcacccgcgcgtgcagatgaaaagggacgctcgcgaggcctacgtgcccaagcagaacctgttcagagacaggagcggcgaggagcccgaggagatgcgcgcagcccgtttccacgcggggcgggagctgcggcgcggcctggacagaaagagggtgctgagggacgaggatttcgaggcggacgagctgacggggatcagccctgcgcgcgcgcacgtggccgcggccaacctggtcacggcgtacgagcagaccgtgaaggaggagagcaacttccaaaaatccttcaacaaccacgtgcgcaccctgatcgcgcgcgaggaggtgaccctgggcctgatgcacctgtgggacctgctggaggccattgtgcagaaccccaccagcaaaccgctgacggcgcagctgttcctggtggtgcagcacagtcgggacaacgagacttttagggaggcgctgctgaatatcaccgagcccgagggccgctggcttctggacctggtgaatattctgcagagcatcgtggtgcaggagcgcgggctgccgctgtccgagaagctggcggccatcaacttttcggtgctgagtttgggcaagtactacgctaggaagatctacaagaccccgtacgtgcccatagacaaggaggtgaagatcgacgggttttacatgcgcatgaccctgaaagtgctgaccctgagcgacgatctgggggtgtaccgcaacgacaggatgcgccgcgcggtaagcgccagcaggcggcgcgagctgagcgatcaggagctgatgcacagcctgcagcgggccctgaccggggccgggaccgagggggagagctactttgacatgggcgcggacctgcactggcagcccagccgccgggtcttggaagccgcggcggtcccttacgtagaagaggtggacgatgaggatgagggcgagtacctggaagactgatggcgcgaccgtatttttgctagatgcagcaacagccacctcctgatcccgcaatgcgggcggcgctgcagagccagccgtccggcattaactcctcggacgattggacccaggccatgcaacgcatcatggcgctgacgacccgcaaccccgaagcctttagacagcagccccaggccaaccggctctcggccatcctggaggccgtggtgccctcgcgctccaaccccacgcacgagaaggtgctggccatcgtgaacgcgctggttgagaacaaggccattcgcggcgacgaggccgggctggtgtacaacgcactgctggagcgcgtggcccgctacaacagcaccaacgtgcagaccaacctggaccgcatggtgaccgacgtgcgcgaagccgtggcccagcgcgaacggttccaccgcgagtccaacctgggatccatggtggcactgaacgccttcctcagcacgcagcccgccaacgtgccccggggccaggaggactacaccaacttcattagcgccctgcggctaatggtgaccgaggtgccccagagcgaggtgtaccagtcgggcccggactacttcttccagaccagtcgccagggcttgcagaccgtgaacctgagtcaggctttcaagaacttgcagggactgtggggcgtgcaggctccggtcggggaccgcgcgacggtgtcgagcctgctgacgccgaactcgcgcctgctgctgctgctggtggcgcccttcacggacagcggtagtatcaaccgcaactcgtacctgggctacctgattaacctgtaccgcgaggccattggccaggcgcacgtggacgagcagacctaccaggagattacccacgtgagccgcgccctcggccaggacgacccgggcaatctggaagccaccctgaacttcttgctgaccaaccggtcgcagaagatcccgccccagtacgcgctgagcgccgaggaggagcgtatattgagatacgtgcagcaaagtgtgggactgttcctgatgcaggagggggccacccccagcgccgcgctcgacatgaccgcgcgcaacatggagcccagcatgtacgccagtaatcgcccgtttattaataagctgatggactacctgcatcgggcggccgccatgaactctgactatttcaccaacgccatcctgaacccccactggctcccgccgccggggttctacacgggcgagtacgacatgcccgaccccaatgacgggtttctgtgggacgacgtggacagcagcgtgttctccccccgaccgggtgctaacgagcgccccttgtggaagaaagagggcagcgaccggcgcccgtcctcggcgctgtccggccgcacgggtgctgccgcagcggtgcccgaggccgccagtccctttccgagcttgtcactgaacagcgtccgcagtagcgagctgggcaggatcacgcgcccgcgcttgctgggcgaggaggagtacttaaataactcgctgttgaggcccgagcgggagaagaacttccccaataacgggatagagagtctggtggataagatgagccgctggaagacgtacgcgcatgagcacagggacgatccccgggcaacgcagggggccaccagccggggcagtgccgcccgtaaacgccgctggcacgacaggcagcggggactgatgtgggacgatgaggattccgccgacgacagcagcgtgttggacttgggcgggagtggtggtggtaacccgttcgctcacctgcgcccccgcgtcgggcgcctgatgtaaaaagaaaccaaaaataaatggtactcaccaaggccatggcgaccagcgtgcgttcgtttcttctctgttgtatctagtatgatgaggcgtgcgtacccggagggtcctcctccctcgtacgagagcgtgatgcagcaggcaatggcggcggcggcggcgatgcagcccccgctggaggctccttacgtgccaccgcggtacctggcgcctacggaggggcgaaacagcattcgttactcggagctggcacccttgtacgataccacccggttgtacctggtggacaacaagtcggcggacatcgcctcgctgaactaccagaacgaccacagcaactttctgaccaccgtggtgcagaacaacgatttcacccccacggaggccagcacccagaccatcaactttgacgagcgctcgcggtggggcggtcagctgaaaaccatcatgcataccaacatgcccaacgtgaacgagttcatgtacagcaacaagttcaaggcgcgggtcatggtctcccgcaagacccccaacggggtgacagtaggggatgattatgatggtagtcaggatgagctgaaatacgagtgggtggagtttgagctgcccgaaggcaacttctcggtgaccatgaccattgacctgatgaacaacgccatcatcgacaattacttggcagtggggcggcagaacggggtgctggagagcgacatcggcgtgaagttcgacacccggaacttcaggctgggttgggaccccgtgaccgagctggtcatgcccggggtgtacaccaacgaggccttccaccccgacatcgtgctgttgcccggctgcggggtggactttaccgagagccgcctcagtaatatgctgggcatccgcaagaggcagcccttccaggagggtttccagatcatgtacgaggacctggatggaggtaacatccccgcgctcttggatgtcgaggcctatgagaaaagcaaggaggagagcgtcgccgcgtcaaccgcagccgtagccaccgcctctaccgaggtccggggcgataattttgctagcgccgcagcagtggcggcggccaaggctgatgaaaccgaaagtaagatagttattcagccggtggagaaggatagcaaggataggagctacaacgtgctctcggacaagaaaaacaccgcctaccgcagctggtacctggcctacaactatggcgaccacgagaagggcgtgcgctcctggacgctgctcaccacctcggacgtcacctgcggcgtggagcaagtctactggtcgctgcccgacatgatgcaagacccggtcaccttccgctccacgcgtcaagttagcaactacccggtggtgggcgccgagctcatgcccgtctactccaagagcttcttcaacgagcaggccgtctactcgcagcagctgcgcgccttcacctcgctcacgcacgtcttcaaccgcttccctgagaaccagatcctcgtccgcccgcccgcgcccaccattaccaccgtcagtgaaaacgttcctgctctcacagatcacgggaccctgccgctgcgcagcagtatccggggagtccagcgcgtgaccgttactgacgccagacgccgcacctgcccctacgtctacaaggccctgggcatagtcgcgccgcgcgtcctctcgagccgcaccttctaaaaaatgtccattctcatctcgcccagtaataacaccggttggggtctgcgcgcgcccagcaagatgtacggaggcgctcgccaacgctccacgcaacaccccgtgcgcgtgcgcgggcacttccgcgctccctggggcgccctcaagggccgcgtgcggtcgcgcaccaccgtcgacgacgtgatcgaccaggtggtggccgacgctcgcaactacacccccgccgccgcgcccgtctccaccgtggacgccgtcattgacagcgtggtgtccgacgcgcgccggtacgcccgcgccaagagccggcggcggcgcatcgcccggcggcaccgtagcaccaccgccatgcgtgcggcgcgagccttgctgcgcagggccaggcgcacgggacgcagggccatgctcagggcggccagacgcgcggcttcaggcgccagcgccggcaggactcggagacgcgcggccacggcggcggcagcggccatagccagcatgtcccgcccgcggcgagggaacgtgtactgggtgcgcgacgccgccaccggtgtgcgcgtgcccgtgcgcacccgcccccctcgcacttgaagatgttcacttcgcgatgttgatgtgtcccagcggcgaggagaaggatgtccaagcgcaaattcaaggaagagatgctccaggtcatcgcgcctgagatctacggccccgcggcggcggtgaaggatgaaagaaatccccgcaaaatcaagcgggtcaaaaaggacaaaaaggaagaagatgatgtggacgatatggtagagtttgtgcgcgagtttgccccccggaggcgcgtgcagtggcgcgggcggaaagtgcgtccggtgctgagacccggcaccacggtggttttcgcgcctggcgagcggtccggcacgacatccaagcgctcctacgatgaggtgtacggggacgaggatattctcgagcaggcggccgagcgcctgggcgagtttgcttacggcaagcgcaaccgccttgcgcccctgaaggaagaggtggtgtccatcccgctggaccacggcaaccccacgccgagtcttaagcccgtgaccctgcagcaggtgctgccgagcgcggcgccgcgtcggggcttgaagcgcgagggcgaggatgtgtaccccaccatgcagctgatggtgcccaagcgccagaagctggaagacgtgctggagaccatgaaggtggacccggacgtgcagcccgaggtcaaggtgaggcccatcaagcaggtggccccgggccttggcgtgcagaccgtggacatcaagatccccacggagcccatggaaacgcagaccgaggtcgtgaagcccatcaccagcaccatggaggtgcagacggatccttggatgccggcggcgccccgaaaaccccggcgcaagtacggcgcggccagcctgctgatgcccaactacgcgctgcatccttccatcatccccacgccgggctaccgcggcacgcgcttctaccacggctataccggctcccgccgccgcaagaccaccacccgccgccgccgtcgtcgccgcacagctgcaactcccgctgccgccctggtgcggagagtgtaccgccgcggccgcgcgcctctgaccctgccgcgggcgcgctaccacccgagcattaccatttaactttgccgtcgcctttgcagatatggctctcacatgccgcattcgcgtccccattacgggctaccgaggaagaaaaccgcgccgtagaaggctggcgggaagcgggatgcgccgccacccccaccggcggcggcgcgccatcagcaagcggttggggggaggcttcctgcccgcgctgatccccatcatcgccgcggcgatcggggcgatccccggcattgcttccgtggcggtgcaggcctctcagcgccactgagacacacacttggaaattgtaataaacccgaatggactctgacgctcctggtcctgtgatgtgtttttgtagacagatggaagacatcaatttttcgtccctggctccgcgacacggcacgcggccgtttatgggcacctggagcgacatcggcaccagccaactgaacgggggcgccttcaattggagcagtctctggagcgggcttaagaattttgggtccacgcttaaaacctatggcagcaaggcgtggaacagcaccacagggcaggcgctgagagataagctgaaagagcagaacttccagcagaaggtagtcgatggcctcgcctcaggcatcaacggggtggtggacctggccaatcaggccgtgcagcggcagatcaacagccgcctggacccggttccccccgccggctccgtggagatgccgcaggtggaggaggagctgcctcccctggacaagcggggcgacaagcgtccccgtcccgacgcggaggagacgctgctgacgcacacggacgaaccgcccccgtacgaggaggcggtgaaactgggcctgcccaccacgcgtcccattgcgcctctagctaccggggtgctgaaacccgagagtagtaagcccgcgaccttggacttgcctcctccgcccactccccgcccctccacagtggctaagcccctgccgccggtggccgtggcccgcgcgcgaccgggggctcgccctcaggcgaactggcagagcactctgaacagcatcgtgggtctgggagtgcagagtgtgaagcgccgccgctgttattaaaaaacactgtagcgcttaacttgcttgtctgtgtatatgtgtatgtccgccgccgctgctgtccagaaggaggagtgaagagaaaggcgcgtcgtcgagttgcaagatggccaccccatcgatgctgccccagtgggcgtacatgcacatcgccggacaggacgcttcggagtacctgagtccgggtctggtgcagttcgcccgcgccacagacacctacttcagtctggggaacaagtttaggaaccccacggtggcgcctacccacgatgtgaccaccgaccgcagccagcggctgacgctgcgctttgtgcccgtggaccgggaggacaacacctactcgtacaaagtgcgctacacgctggccgtgggcgacaaccgcgtgctggacatggccagcacctactttgacatccgcggcgtgctggatcggggccctagcttcaaaccctactccggcactgcctacaacagcctggctcccaagggagcgcccaacacctgccagtggaaggattctgacagcaaaatgcatacctttggggcagctgccatgcccggtgttactgggaaaaagatagaagctgatgggctgcctattagaatagattcaacttctggaactgacacagtaatttatgctgataaaactttccaaccagaaccacaagttggaaatgacagttgggttgacaccaatggtgcagaggaaaaatatggaggcagagctctaaaggacactacaaaaatgaaaccctgttatggttcattcgccaagcctaccaacaaagaaggtggtcaggctaacttaaaagattcagaacccgccgccaccactcctaactatgatatagacctggctttctttgacagcaaaactattgttgctaactacgatccagatattgtaatgtacacagaaaatgttgacttgcagactccagatactcatattgtatacaaacctggaacagaggacaccagctctgaatccaatttgggtcagcaggccatgcctaacagacccaactacattggcttcagagacaattttatcgggctcatgtactacaacagcactggcaatatgggggtgctggccggtcaggcctctcagctgaatgctgtggttgacttgcaagacagaaacactgaactgtcctaccagctcttgcttgactctctgggtgacagaacccggtatttcagtatgtggaatcaggcggtggacagctatgatcctgatgtgcgcattattgaaaaccatggtgtggaggatgaattgccaaactattgctttccgttgaatggtgtgggattgacagacacttaccagggtgttaaagttaaaacagatgcaggttctgaaaagtgggacaaagatgacaccacagttagtaatgctaatgaaatccatgtaggcaatccttttgccatggaaatcaacatccaagccaacctgtggaggaacttcctctatgccaatgttgccctctatttgcctgataaatacaaatacacaccggccaacatcaccctgcccaccaacaccaacacctacgagtacatgaacggccgggtggtggcgccctcgctggtggacgcctacattaacattggggcgcgctggtcgctggaccccatggacaacgtaaatcccttcaaccaccaccgcaatgcgggcttgcgctaccgctccatgctcctgggcaacgggcgctacgtgccattccacatccaggtgccccagaaattttttgccattaagagcctcctgctcctgcccgggtcctacacctacgagtggaacttccgcaaggacgtcaacatgatcctgcagagttcccttggcaacgacctgcgcacagacggggcctccatcaccttcaccagcattaacctctacgccaccttcttccccatggcgcacaacaccgcctccacgcttgaggccatgctgcgcaacgacaccaatgaccaatccttcaacgactacctctcggcggccaacatgctctatcccatcccggccaacgccaccaacgtgcccatctccatcccctcgcgcaactgggccgcctttcgcggctggtccttcacgcgactcaagaccaaagagacgccctcgctgggctccgggttcgacccctacttcgtctactcgggctccatcccctacctcgacggcaccttctacctcaaccacaccttcaagaaggtctccatcaccttcgactcttccgtcagctggcccggcaacgaccggctcctgacgcccaacgagttcgaaatcaagcgcaccgtcgacggcgagggatacaacgtggcccagtgcaacatgaccaaggactggttcctggtccagatgctggcccactacaacatcggctaccagggcttctacgtgcccgagggctacaaggaccgcatgtactccttcttccgcaacttccagcccatgagccgccaggtggtggacgaggttaactacaaggactaccaggccgtcaccctggcctaccaacacaacaactcgggcttcgttggatacctcgcgcccactatgcgccagggccagccctaccccgccaactacccctacccgctcatcggcaagagcgccgttaccagcgtcacccagaaaaagttcatctgcgacagggtcatgtggcgcatccccttctccagcaacttcatgtccatgggcgcgctcaccgacctcggccagaacatgctctatgctaactccgcccacgcgctagacatgaatttcgaagtcgaccccatggatgagtccacccttctctatgttgtcttcgaagtcttcgacgtcgtccgagtgcaccagccccaccgcggcgtcattgaggccgtctacctgcgcacccccttctcagccggtaacgccaccacataaattcttgcttcttgcaagaagccatggccgcgggctccggcgagcaggagctcagggccatcatccgcgacctggggtgcgggccctacttcctgggcaccttcgataagcgattcccgggattcatggccccgcacaaggtggcctgcgccatcgtcaacacggccggccgcgagaccgggggcgagcattggctggccttcgcctggaacccgcgctcgaacacctgctacctcttcgaccccttcgggttctcggaccagcgcctcaagcaaatctaccagttcgagtacgagggactgctgcgccgcagcgccctggccaccaaggaccgctgcgttaccctggaaaagtccacccagaccgtgcagggtccgcgttcggccgcctgcgggcttttctgctgcatgttcctacacgccttcgtgcactggcccaaccgccccatggacaaaaatcccaccatgaacttgctgacgggggtgcccaacggcatgctccagtcgccccaggtggaacctaccctgcgccgcaaccaggaggcactctaccgcttcctcaactcccactctgcatactttcgctctcaccgcgcgcgcattgagaaggccaccgccttcgaccgcatgaatcaagacatgtaacagtgtgttttaaaatatgtttaataaacagcactttttatgtgacacatgcatttgagataattttattcttaaaaatcgaaggggttctgccgggaggtttcggcatggcccgcgggcagggacacgttgcggaactggtacttggccagccacttgaactcggggatcagcagtttcggcagcagggtgtcggggaacgagtcggtccacagcttccgcgtcagttgcagggcgcccagcaggtcgggcgcggagatcttgaaatcgcagttgggacccgcgttttgcgcgcgagagttgcggtacacagggttgcagcactggaacaccatcagggccggatgcttcacgctcgccagcaccgtagcgtcggtgatcccgtccacgtcgaggtcttcggcgttggccatcccgaagggggtcatcttgcaggtctgccggcccatggtgggcacgcagccgggcttgtggttgcaatcgcagtgcagggggatcagcatcatctgggcctggtcggcgttcatccccgggtacatggccttcatgaaagcctccagctgcttaaacgcctgctgggccttggctccctcggtgaagaagaccccgcaggacttgctagaaaactggttggtagcgcacccggcgtcgtgcacgcagcagcgcgcgtcgttgttggccagctgcaccacgctgcgcccccagcggttctgggtaatcttggcccggtcggggttctcctttagcgcgcgttgcccgttctcgcttgccacatccatctcgatcatgtgctccttctggatcatggtggtcccgtgcaggcaccgcagcttgccctcgacttcggtacagccgtgcagccacagcgcgcaccccgtgctctcccagttcttgtgggcgatctgggaatgcgcatgcacgaacccctgcaggaagcggcccatcatggtcgtcagggtcttgttactggtaaaggtcagcggaatgccgcggtgctcctcgttgatgtacaggtggcagatgcggcgatacacctcgccctgctcgggcatcagttggaagttggattttaggtcgctttccacacggtagcgctccatcagcatattcatgatttccatgcccttctcccaggccgatacaatgggcaggctcagggggttcgtcaccgccatcttagcgctagcagccttcgtcagcgggtcgttctcattgagagtctcaaagctccgcttgccgtccttctcggtgatccgcacgggggggtagctgaagcccacggccgccagctcctcctcggcctctctttcgtcctcgctgtcctggctgacgtcctgcaggggcacatgcttcgttttgcggggtttctttttgggcggctgctgcggcggcggtggttgttcctgaggcgagggggagcgcgagttctcgctcaccactactatctcttcttcttggtccgaggccacgcggcggtaggtatgtctcttcaggggcagaggcggaggcgacgggctctcgcggcccggcgggtggctggcagagccccttccgcgatcgggggtgcgctcccggcggcgctctaactgacttcctccgcggccggccattgtgttctcctagggaacaacaacaagcatggagactcagccatcgtcgccaacctcgccatctgcccccaccgccgacaagaagcagcagcagaatgagagcttaaccgccccgccgcccagccccgccacctttgtcgcggccccagacatgcaagagatggaggaatccattcagattgacctgggctatgtgacgcccgcggagcacgaggaggagcttgcagtgcgcttttcaacccaggaagagatacaccaagaacagccagagcaggaagcaaagagcgagcatgactacctccaccagagcgggggggaggacgccctcatcaagcatctggcccggcaggccatcatcgtcaaggacgcgctgcttgaccgcaccgaggtgcccctcagcgtggaggagctcagccgcgcctacgagctcaacctcttctcgccgcgcgtgccccccaagcgccagcccaacggcacctgcgagcccaacccacgcctcaacttctacccggtcttcgcggtgcccgaggccctggccacctaccacatctttttcaagaaccaaaggatccctgtctcctgtcgcgccaaccgcacccgcgccgactcccttttcaacctgggccccggtgcccgcctacctgatatcgcctccttggaagaggttcccaagatcttcgagggtctgggcagcgacgagactcgggccgcaaacgctctgcaaggagaaggaggagatcatgagcaccacagcgccctggtggagttggaaggcgacaacgcgcgtctggcggtgctcaagcgcacgatcgagctgacccatttcgcctacccggcgcttaacctgccccccaaagtcatgagcacggttatggaccaggtgctcatcaagcgcgcgtcgcccatctccaaggagatgcaagaccccgagagctccgaggagggcaagcccgtggtcagcgacgagcagctggcgcggtggctgggaccccaagctagtccccagagcttggaagagcggcgcaagctcataatggccgtggtcctggtgaccgcggagctggagtgtctgcgccgcttcttcgccgacgcagaaactctgcgcaaggtcgaggagaacctgcactacatcttcaggcacgggttcgtacgccaggcctgcaagatctccaacgtggagctgaccaacctggtctcctacatgggcatcttgcacgagaaccgcctggggcagaacgtgctgcacaccaccctgcgcggggaggcccgccgcgactacatccgcgactgcgtttacctctacctctgccacacctggcagacagccatgggcgtgtggcagcagtgtctggaggagcagaacctaaaagagctctgcaagctcctgcagaagaacctcaaggccctgtggaccgggttcgacgagcgcaccaccgcctcggacctggcagacctcattttccccgagcgtctcaggctgacgctgcgcaacggtttgcccgactttatgagtcaaagcatgttgcaaaactttcgctctttcatcctcgaacgctccgggatcctgccggccacctgctccgcgctgccctcggacttcgtgccgctgaccttccgcgagtgccccccgccgctgtggagccactgctacctgctgcgcttggccaactacctggcctaccactcggacgtgatcgaggacgtcagcagcgagggcctgctcgagtgccactgccgctgcaacctctgcacgccgcaccgctccctggcctgcaacccccagctgctgagcgagacccagatcatcggcaccttcgagttgcaagggcccggcgatgagggttctgccgccaaggggggtctgaaactcaccccggggctgtggacctcggcctacttgcgcaagttcgtgcccgaggactaccatcccttcgagatcaggttctacgaggaccaatcccagccgcccaaggccgagctgtcggcctgcgtcatcacccagggggcgatcctggcccaattgcaagctatccagaaatcccgccaagaattcttgctgaaaaagggccgcggggtctaccttgatccccagaccggtgaggagcttaaccccggcttcccccaggatgccccgaggaagcagcaagaagctgaaagtggagctgccgcccgtggaggatttggaggaagactgggagagcagtcaggcagaggaggaggagatggaagactgggacagcactcaggcagaggacagcctgcaagacagtctggaagacgaggaggaggcagaggaggtggaagaagtagccgccgccgccagaccgtcgtcctcggcggagaaagcaagcagcacggataccatctccgctccgggtcggggtcccgctcgaccccacagtagatgggacgagaccgggcgattcccgaaccccaccacccagaccggtaagaaggagcggcagggatacaagtcctggcgggggcacaaaaacgccatcgtctcctgcttgcaagcttgcgggggcaacatctcattcacccggcgctacctgctctttcaccgcggggtgaacttcccccgcaacatcttgcattactaccgtcacctccacagcccctactacttccaagaagaggcagaaaaagacaaaaccagcagctagaaaatccacagcggcggcggcaggtggactgaggatcgcggcgaacgagccggcgcagacccgggaactgaggaaccggatctttcccaccctctatgccatcttccagcagagtcgggggcaggagcaggaactgaaagtcaagaaccgttctctgcgctcgctcacccgcagttgtctgtatcacaagagcgaagaccaacttcagcgcacgcttgaggacgccgaggctctcttcaacaagtactgcgcactcactcttaaagagtagcccgcgcccgcccacacacggaaaaaggcgggaattacgtcacctgtgcacccccacccagcaccgctatgagcaaagaaattcccacgccttacatgtggagctaccagccccagatgggcctggccgccggcgccgcccaggactactccacccgcatgaattggctcagcgccgggcccgggatgatctcacgggtgaatgacatccgcgcccaccgaaaccagatactcctagaacagtcagcgctcaccgccacgccccgcaatcacctcaatccgcgtaattggcccgccgccctagtgtaccaggaaattccccagcccacgaccgtactacttccgcgagacgcccaggccgaagtccagctgactaactcaggtgtccagctggcgggcggcgccaccctgtgtcgtcaccaccccgctcagggtataaagcggctggtgatccggggcagaggcacacagctcaacgacgaggtggtgagctcttcactgggtttgcgacctgacggagtcttccaactcgccggatcgggaagatcttccttcacgcctcgtcaggccgtgctgactttggagagttcttcctcgcaacctcgctcgggcggcatcggcactctccagtttgtggaggagttcactccctcggtctacttcaaccccttctccggctcccccggccactatccggacgagttcatcccgaacttcgatgccatcagcgaatcggtagacggctacgattgaatgtcccatggtggcgcggctgacctagctcggcttcgacacctggaccactgccgccgctttcgctgcttcgctcgggacctcgccgagtttacctactttgagctgtccgaggagcaccctcagggcccggcccacggagtgcggatcgtcgtcgaagggggcctagactcccacctgcttcgtatcttcagccagcgcccgatcctggtccagcgccaacagggcaacaccctcctgaccctttactgcatctgcaaccaccccggcctgcatgaaagtctttgttgtctgctgtgtactgagtataataaaagctgagatcagcgactactccggactcgattgtgttcctgcatccctcaaccagtctctgaccttcaccgggaacgaaacagagctccatctccagtgtaagccccacaaaaagtacctcacctggctgcaccagggctccccaatcgccgttgttaaccactgcaacgacgacggagtcctgctgaacggccccgccaaccttactttttccacccgcagaagcaagctactgctcttccgacccttcctaccagggatctatcagtgcgtctcgggaccctgccatcacaccttccacctgatcccgaataccacctcttccccagcgccgctcctcactaacaaccaaactaaccaccaccaacgctaccgtcgagacctcgttgaatctaataccacccacaccggaggtgagctccgaggtcctcagtcatctgggatttattacggtccctgggaggtggtggggttaatagctttaggcttagtagcgggtgggcttttggctctttgctacctatacctcccttgcttttcctacttagtggtgctttgttgctggtttaagaaatggggaagatcaccctagtgtgcggtgtgctggtggcggtactttcgattttgggtctgggcagcgcggctgtagtgacggagaaggccgatccctgcttgacttttaaccccgacaaatgccagctgagttttcagccagatggcaatcggtgcgcggtgttgattaagtgcggatgggaatgccagagcgtggcgatccagtataaaaacaagacgcggaacaatactctcgcgtccacatggcagcccggggaccccgagtggtacaccgtctctgtccctggtgctgacggcttccttcgcacggtaaacaacacttttatttttgagcacatgtgcaataccgccatgttcatgagcaggcagtaccatatgtggcccccacggaaagagaatatcgtggtcttctccatcgcttacagcttgtgcacggtgctaatcaccgcgatcgtgtgcctgagcattcacatgctcatcgctattcgccccagaaataatgctgagaaagagaaacagccataacaccattttttcacacacctttttcagaccatggcctctgttacagccattatttattttttgggtcttctgggatttatcaacagttttgaccataaaaacgtaactgcttatgttggttctaactgtgtactaactgggtaccagtcacaccaacgggtttcatggtactggtttgataaaaaaaacacagcttatacactttgcaaaggtaatcagcggcccacacagcgcagtggtctttattacagctgcactaataataatatcacactacttcaagtgactaaacaatattctgggacatactatggaaccaattttaacacggaacaggacacttactatagtgtcaaagtattggatccaactactcccagaactactaccaaacataccacaactaaaaagcccactatacctaaaaccactaaattaacaaccacaaccagcaccacacttgctgtgacctcacaggcaactactgaaaacgaattggttgccctgttgcagaatggggagaataatagcagcagtcctctgcctaccacccccagtgagcaaattcccagatccatgattggcattatcgctgctgtggtggtgtgtatggtcattatcatcttgtgcatgatgtactatgcctgctactacagaaaacacagactgaacaacaagctggacccctactgaattttgatttttaattacaaattaattgtggttgatcccactacacctccacccaccacaactaccacagacacacaagaacccactccagaggcagtagcagagttagcaaagcagatttatgaagattcctttgttgctaatactcccacacacctcggaccgcaatgtccagggttagtagtcagcggcatcgtcggtgtgctttgtgggttagcagttataatcatctgcatgttcatttttgcttgctgctacagaaggcttcaccgacagaaatcagacccactgctgaacctctatgtttaatttttgattttccagagccatgaaggcacttagcactttagtttttttgtccttgattggcattgtttttagtaatcctattcctagagttagctttattaaaccagttaatgttactgaagggagcaatgtgacactggtaggtgtagagggtgctaaaaacaccacctggacaaaatatcaccttaatgggtggaaagatatctgcaattggagtgtgacagtttatacatgcgagggagttaatcttaccattgtcaatgcaacctcagctcaaaatggtagaattcaagggcaaagtgttagtgattctgaggggtattatacccaacatacttttatctatgacattaaggtcataccattgccaacacccagcccacctagcactactcaaaccactacatcaactcagcccaccgccaccacaacagcagaggcatttttgttgctgccaccatctagcagtcccactgctagtaccaataagcagactactaaatttttgtccactactgaaagccacaccacagctaccttgagagccttctctagcaccgctaatcttacctcgctttcctatacattaatcagttctgttactacctctaccccagcttctcttcccactcccctgaagcaaaccgaaggcggtttgcaatggcagatcaccctactcattgtgatcggggtggtcatcctagcgatgctgctctacttcatcttctgccgccgcatccccaacgcgaaaccggtctacaagcccatcgttatcgggcagccggagccgcttcaggtggagggaggtctaaggaatcttctcttctcttttacagtatggtgatttgaactatgattcctagacagttctttatcattggtcttctctgcgcgctccaagtctgtgccaccctcgctctggtggctaatgcgagtccagactgcattggaccgttcgcctcctacgtgctctttgccttcatcacctgcatctgctgctgtagcatagtctgcctgcttattaccttcttccagttcgttgactgggtctttgtgcgcatcgcctacctgcgccaccacccccagtaccgcgaccaaagagtggcgcagctgctcaggctcatctgataagcatgcgggctttgctacttctcatgcttctactattgctagctcccctggtcgccccctttcccctcaaatcccccacccagtcccccaaagaggttcgaaactgtaaattccaagaaccctggaaattcctcaaatgctaccagctcaaatcagacatgcaccccagctggataattatcatgggaatcgtgaacatccttgcctgcaccttcttttcctttgtgatttacccccgctttgactttggttggaacgcacccgaggcgctctggctcccgcctgatcccgacacaccaccacagcagcagcaaaatcaggcacacgcaccaccaccacagcctaggccccaatacatgcccatcttaaactatgaggccgagccacaacgagccatgcttcctgctattagttacttcaatctaaccggtggagatgactgacccactcaacaacactgtcaacgacctcctggacatggacggccgcggctcggagcagcgtctcgcccaactccgcattcgccagcagcaggagagagccgtcaaggagctgcaggacgcagtggccatccaccagtgcaagaaaggcatcttctgcctggtgaagcaggccaagatctccttcgaggtcacttccaccgaccatcgcctctcctacgagctcctgcagcagcgccagaagttcacctgcctggtcggagtcaaccccatcgtcatcacccagcagtctggcgataccaagggttgcatccactgctcctgcgactcccccgagtgcgttcacaccctgatcaagaccctatgcggcctccgcgacctcctccccatgaactaatcaactaaccccttaccccattacccatccagtaaaaaaaataaagattaaagagacgatgattttgaattgatcaataaagaatcacttacttgaaatctgaaaccaggtctctgtccatgttttctgtcagcagcacttcgctcccctcttcccagctctggtactgcaggccccggcgggctgcaaacttcctccacactctgaaggggatgtcaaattcctcctgtccctcaatcttcattttttatttctattagatgtccaaaaagcgcgcgcgggtggatgatggcttcgaccccgtgtatccctacgatgcagacaacgcaccgaccgtgcccttcatcaaccctcccttcgtctcttcagatggattccaagaaaagcccctgggggtgttgtcccttaggctggccgaccctgtcaccaccaagaatggggaaattaccctcaagctgggggagggggtggaccttgacgactcgggaaaactcattgcaaacacagtaaacaaggccattgcccctctcagtttttccaacaacaccatttcccttaacatggatacccctttatacaccaaagatggaaaactatccttacaagtttctccaccattaagtatattaaaatcaacaattttgaatacattagctctagcttttggctcaggtttaggactcagtggcagcgccctggcagtacagttagcctctccacttacatttgatgataaagggaatataaagattaccctaaacaggggattgcatgttacaacaggagatgcaattgaaagcaacatcagttgggctaaaggtataaaatttgaagatggtgccatagctacaaacattggtaaggggctagagttcggaaccagtagtacagaaacaggagttaataatgcttatccaatccaagttaaacttggctctggtctcagctttgacagcacaggagccataatggctggcaataaagactatgataaattaactttgtggacaacgcctgacccatcaccaaactgtcaaatacttgcagaaaatgatgcaaaactaacactttgcttaactaagtgtgacagtcaaatactggccactgtatcagttttggttgttagaagtggaaacttaaacccaattactggcacagtaagcagtgctcaagtttttctacgttttgatgcaaatggtgttcttttaacagaacactctacactaaaaaaatactggggctacaagcaaggagatagcatagatggcactccatacaccaatgctgttggttttatgccaaattcaacagcttatccaaagacccaaagttctactactaaaaataatatagtgggtcaagtatacatgaatggagatgtttcaaaacccatgcttcttactataactcttaatggtactgatgacaccaccagtgcatactcaatgtcattttcatacacctggactaacggaagctatatcggagcaacatttggagctaactcatacaccttctcctacatagcccaacaataatcccaccctgcatgccaacccaccttttccctctatttataaatggaaactgaaacaaaaataaagttcaagtgttttattgattcaacagtttttcacaggattcgagtagttattttccctccaccctcccatctcatggaatacactatcctctccccacgcacagccttaaacatctgaatgctattggtaatggacatggttttgatctccacattccacacagtttcagagcgagacagtctcgggtcggtcaaggagatgaaaccctccgggcactcctgcatctgcacctcacagttcaacagctgagggctgtcctcggtgattggaatcacagttatctggaataagagcgatgagaatcataatccgcaaacgggatcgggcggttgtggcgcatcaggccccgcagcagtcgctgtctgcgccgctccgtcaagctgctactcaaggggtccgggtccagggactccctgcgcatgatgccaatggccctgagcatcagtcgcctggtacggcgggcgcagcagcggatgcggatctcactcaggtcggagcagtacgtgcagcacagcaccaccaagttgttcaacagtccatagttcaacgtgctccagccaaaactcatttgtggaactatgctgcccacatgtccatcgtaccagatcctgatgtaaatcaggtggcgtcccctccagaacacactgcccatgtacatgatctccttgggcatgtgcaggttcaccacctcccggtaccacatcacccgctggttgaacatgcagccctggataattctgcggaaccagatggcaagtaccgtcccgcccgccatgcagcgcagggaccccgggttctggcaatggcagtggatcacccaccgctcgcgaccgtggatcaactgggaactaaacaagtctatgttggcacagcacaggcacacgctcatgcatgtcttcagcactctcaattcctcgggggtcaggaccatatcccagggcacagggaactcttgcaggacagtgaacccggccgaacagggcaatcctcgcacggaacttacattgtgcatggacagggtatcgcaatcaggcagcaccggatgatcctccaccagagaagcgcggctctcggtctcctcacagcgaggtaaggtggccggcggttggtacggatgatggcgagataacgctaatcgtgttctggatcgtgtcatgatggagctgtttccggacattttcgtatttcacaaagcagaacctggtccgggcactgcacaccgctcgtcggcgacggtctcggcgcttcgagcgctcaatgttgaagttatagaacagccactccctcagaacgtgcagtatctcctgagcctcttgggtgatgaaaatcccatccgccctgatggctctgattacatcaaccacggtggaatgggccaaacccagccagatgatgcaattttgttgggtttcggtgacggcgggggagggaagaacaggaagaaccatgattaactttattccaaacggtctcggaacacttcaaaatgcaggtcccggaggtggcacctctcgcccccactgtgttggtggaaaataacagccaggtcaaaggtaacacggttctcgagatgttccacggtggcttccagcaaagcctccacgcgcacatccagaaacaagaggacagcgaaagcgggagcgttttctaattcctcaatcatcatattacactcctgcaccatgcctagataattttcatttttccagccttgaatgattcgtattagttcctgaggtaaatccaagccagccatgataaaaagctcgcgcagagcgccctccaccggcattcttaagcacaccctcataattccaacagattctgctcctggttcacctgtagtagattaacaagtggaatatcaattgctctgccgcaatccctaagctcctcccttagcagtaactgtatgtactcattcatatcttctccgaaatttttagccataggaccaccaggaacaagagaagggcaagccacattacagataaagcgaagtcctccccagtgagcattgccaaatgtaagattgaaataagcatgctggctagacccggtgatatcttccagataactggacagaaaatcaggcaagcaatttttaagaaaattaacaaaagaaaagtcgtctaggtgcacgtttagagcctcaggaacaacgatggaataagtgcaaggagtacgttccagcatggttagtgtttttggtgatctgtagaacaaaaaataaacatgcaatattaaaccatgctagcctggcgaacaggtggataaatcactctttccaacaccaggcaggctacagggtctccggcgcgaccattgtagaagctgacattatgattaaaaagcatcaccgacagaccttcccggtggccggcatggatgattcgagaagaagcatacactccgggaacattggcgtccgtgagtgaaaaaaagcgacctataaagccttgaggcactacaatgcttaatcttaattccagcaaagcgaccccatgcggatgaagcacaaaattggcaggtgcgtaaaaaatgtaattactccccttctgcacaggcagcaaagcccccgctccctccagaaacacatacaaaacctgagcgtccatagcttaccgagcacggcaggcgcaagagtcagagaaaaagctgagctctaacctaactgcccgcttctgtactcaatatatagccctaacctcactgacgtaaaggccaaggtctaaaaatacccgccaacacgcccagaaaccggtgacacactaaaaaaatacgtgcacttcctcaaacgcccaaactggcgtcatttccggtttcccacgctacgtcacctctcaacgactttcaaattccgtcgaccgttaaacacatcagttaccccgcccctaacgaacgccgctgtcacagccaatcagcgcgccccatccccaaattttcacgccttatttgcatattaactcacacaaaaaaaataaggtatattattgatgatgc

SEQ ID NO: 32 - DNA, 35064 bp, Adenovirus G52
  MISC_FEATURE (1)..(35064): Complete Genome
ctgcaggttaattaaggaagggcgaattctgcagatatccatcacactggcggccgctcgagcatgcatctagagggcccaattcgccctatagtgagtcgtattacaattcactggcccatcatcaataatataccttaaagctggaaacgagccaatatgataatgagcggggaggagcgaggcggggccggggtgacgtgggaatggggagaggggcggggcggggcgaggttcgcaggcgggcgtggggaggcgcttagcttttacgtatgcggaaggaggttttatgccggaagttgggtaatttgggcgtatacttgtaagttttgtgtaaattggcgcgaaaactgggtaatgaggaagttgaggttaatatgtactttttatgactgggcggaatttctgctgatcagcagtgaactttgggcgctgacggggaggtttcgctacgtggcagtaccacgagaaggctcaaaggtcccatttattgtactcctcagcgttttcgctgggtatttaaacgctgcatcatcaataatataccttattctggaaacgtgccaatatgataatgagcggggaggagcgaggcggggccggggtgacgtgggaatggggagaggggcggggcggggcgaggttcgcaggcgggcgtggggaggcgcttagcttttacgtatgcggaaggaggttttatgccggaagttgggtaatttgggcgtatacttgtaagttttgtgtaaattggcgcgaaaactgggtaatgaggaagttgaggttaatatgtactttttatgactgggcggaatttctgctgatcagcagtgaactttgggcgctgacggggaggtttcgctacgtggcagtaccacgagaaggctcaaaggtcccatttattgtactcctcagcgttttcgctgggtatttaaacgctgtcagatcatcaagaggccactcttgagtgccggcgagtagagttttctcctccgcgctgccgcgatgaggctggtccccgagatgtacggtgttttctgcagcgagacggtccggaactcagatgagctgcttaatacagatctgctggatgttcccaactcgcctgtgacttcgcctccgtcgcttcatgatcttttcgatgtggaagtggatccaccgcaagatcccaacgaggacgcggtaaacagtatgttccctgaatgtctgtttgaggcggctgaggagggttctcacagcagtgaagagagcaaacggggagaggaactggacttgaaatgctacgaggaatgtctgccttctagcgattctgaaacggaacaaacagggggagacggctgtactgagccggtagtgaaaaatgaacttgtattagactgtcctgatcaacctggtcatggctgccgtgcctgtgcttttcatagaaatgccagcggaaatcctgaaactctatgtgctctgtgttacctgcgtcttaccagcgattttgtatacagtaagtaggagctttttcgatttgcgcatggtggtgggattgttaaagtgtgttgggcttattgcttgtgtaatgttttacaggtgacgtgtctgacgcggaaggggacggagatagatcagggtctgctaattctccttgcactttgggggctgtggttccagttggcattattaaacccgtggcggtcagagtctcaggcagacggtgtgcagttgaaaaattggaagacttgctacaggaagaacagacggaacctttggacctatccatgaaacgccctaagctgacctaagtgtgtttattgcatgtaataaaagtgttgatctttgaactgtgtttatgtgttgggtgtgtctgtgggtatataagcaggtgaatgggaagtgagagcacagctgccttaatggatctcttggggaacttgagggaatttgacgtggttcgccgcttgctggagttggcctctgacaaaacttccaggctttggaggttttggtttggctcaacgcttagcagcgtagtttatagggtaaaaagagagcaggaggcgcagtttgctaggctgttggccgatactcctggagtttttgtggctctggatctaggccatcactctcttttccaagagaaaatcatcaaaaacttaacttttacgtctcctggtcgcacggttgcttccgctgcctttattacctatattttggatcaatggagcaacagcgacagccacctgtcgtgggagtacatgctggattacatggcgatggctctgtggagggccatgctgcggaggagggtttgcatttacttgcgggcgcagcctccgcggctggaccgagtggtggaggagaacgagccggaggagaccgagaatctgagagccggcctggaccctccagtggaagactaggtgctgaggatgatcctgaagaggggactagtgggggtgctaggaaaaagcaaaaaactgagcctgaacctagaaactttttgaatgagttgactgtaagcctaatgaatcggcagcgtcctgagacggtgttttgggctgagttggaggatgagttcaagaagggggaattaaacctcttgtacaagtatgggtttgagcagttgaaaactcactggttggagccgtgggaggatatggaaatggctctagacacctttgctaaagtggctctgcggccggataaagtttacactattcgccgcactgttaatataaaaaagagtgtttatgttattggtcatggagctctggtgcaggtgcagaccccagaccgggtggctttcaattgcggcatgcagagtttgggccccggggtgataggtttgaatggagttacatttcaaaatgtcagatttactggtgataattttaatggctctgtgtttgtgactagcacccagctaaccctccacggtgtttacttttttaactttaacaatacatgtgtggagtcatggggtagggtgtctctgaggggctgcagttttcatggttgctggaaggcggtggtgggaagaattaaaagtgtcatgtctgtgaagaaatgcatatttgaacgctgtgtgatagctctagcagtagaggggtacggacggatcaggaataacgccgcatctgagaatggatgttttcttttgctgaaaggtacggccagcgttaagcataatatgatttgcggcagcggcctgtgcccctcgcagctcttaacttgcgcagatggaaattgtcacaccttgcgcaccgtgcacatagtgtcccactcgcgccgcacctggccaacatttgagcacaatatgctcatgcgttgtgccgttcacctaggtgctagacgcggcgtgtttatgccttaccaatgtaactttagccatactaagattttgctggaaactgattccttccctcgagtatgttttaatggggtgtttgacatgtcaatggaactttttaaagtgataagatatgatgaaaccaagtctcgttgtcgctcatgtgaatgcggagctaatcatttgaggttgtatcctgtaaccctgaacgttaccgaggagctgaggacggaccaccacatgctgtcttgcctgcgtaccgactatgaatccagcgatgaggagtgaggtgaggggcggagccacaaagggtataaagtggcatgaggggtgggcgcggtgtttcaaaatgagcgggacgacggacggcaacgcgtttgaggggggagtgttcagtccatatctgacatctcgtcttccttcctgggcaggagttcgtcagaatgtagtgggctccaccgtggacggacgaccggtcgcccctgcgaattccgccaccctcacctatgccaccgtgggatcatcgttggacactgccgcggcagctgccgcttctgctgccgcttctactgctcgcggcatggcggctgattttggactgtataaccaattggccactgcagctgtggcatctcggtctctggttcaagaagatgccctgaatgtggtgctgcttcggctggaggatctgtctcggcgcttggatcaactagctgcgcagatatccccatctaactccgattctacagaatcttaaataaagacaaataaatttgttgaaaataaacggctttatttgttttttttggctcggtaggctcgggtccacctgtcccggtcgttaaggaccttgtgtatgttttccaagacccggtacagatgggcttggatgttcaagtacatgggcatgaggccatcccgggggtggagataggaccattgcagagcgtcatgctccggggtggtgttgtaaataacccagtcgtagcagggtttctgagcgtggaactggaagatgtcctttaggagcaggctgatggccaagggcagccccttagtgtaggtgttaacaaagcggttaagctgggagggatgcatgcggggggagatgatatgcatcttggcttgaattttgaggttagctatgttaccacctaggtccctgcgggggttcatgttatgaaggaccaccagcacggtgtagccggtgcacttggggaacttgtcatgcagtttggaggggaaggcgtggaagaatttagagacccccttgtggcctcctaggttttccatgcactcatccataatgatggcaatgggacccctggcggccgctttggcaaacacgttttgggggttggaaacatcatagttttgctctagagtgagctcatcataggccatcttaacaaagcggggtaggagggtgcccgactgggggatgatagttccatctgggcctggggcgtagttgccctcacaaatctgcatttcccaggccttaatttccgaggggggtatcatgtccacctggggggcgataaagaacacggtttctggcgggggattgatgagctgggtggaaagcaagttacgcaacagttgggatttgccgcagccggtgggaccgtagatgaccccgatgacgggttgcagctggtagttgagagaggaacagctgccgtcggggcgcaggaggggggctacatcgttcatcatgcttctgacatgtttattttcactcactaagttttgcaagagcctctccccacccagggataagagttcttccaggctgttgaagtgtttcagcggtttcaggccgtctgccatgggcatcttttcaagcgactgacgaagcaagtacagtcggtcccagagctcggtgacgtgctctatggaatctcgatccagcagacttcttggttgcgggggttgggccgactttcgctgtagggcaccagccggtgggcgtccagggccgcgagggttctgtccttccagggtctcagtgttcgggtgagggtggtctcggtgacggtgaagggatgagccccgggctgggcgcttgcgagggtgcgcttcaggctcatcctgctggtgctgaagcgggcgtcgtctccctgtgagtcggccagatagcaacgaagcatgaggtcgtagctgagggactcggccgcgtgtcccttggcgcgcagctttcccttggaaacgtgctgacatttggtgcagtgcagacacttgagggcgtagagtttgggggccaggaagaccgactcgggcgagtaggcgtcggctccgcactgagcgcagacggtctcgcactccaccagccacgtgagctcgggtttagcgggatcaaaaaccaagttgcctccattttttttgatgcgtttcttaccttgcgtctccatgagtctgtgtccagcttccgtgacaaaaaggctgtcggtgtccccgtagaccgacttgagggggcgatcttccaaaggtgttccgagatcttccgcgtacaggaactgggaccactccgagacaaaggctcgggtccaggctaacacgaaggaggcgatctgcgaggggtatctgtcgttttcaatgagggggtccaccttttccagggtgtgcagacacaggtcgtcctcctccgcgtccacgaaggtgattggcttgtaagtgtaggtcacgtgacccgcaccccccaaaggggtataaaagggggcgtgcccaccctccccgtcactttcttccgcatcgctgtggaccagagccagctgttcgggtgagtaggccctctcaaaagccggcatgatctcggcgctcaagttgtcagtttctacgaaagaggaggatttgatattcacgtgccccgcggcgatgcttttgatggtggaagggtccatctgatcagaaaacacgatctttttattgtcaagtttggtggcgaaagacccgtagagggcgttggaaagcaacttggcgatggagcgcagggtctgatttttctcccgatcggccctctccttggcggcgatgttcagttgcacgtactcgcgggccacgcaccgccactcggggaacacggcggtgcgctcgtcgggcaggatgcgcacgcgccagccgcggttgtgcagggtgatgaggtccacgctggtggccacctccccgcggaggggctcgttggtccaacacaatcgccccccttttctggagcagaacggaggcaggggatctagcaagttggcgggcggggggtcggcgtcgatggtgaagatgccgggtagcaaaacctgattaaaataatcgatttgtgtgtccgtgtcttgcaacgcctcgtcccacttcttcaccgcgagggccctttcgtagggattcaggggcggtccccagggcatggggtgggtcagggccgaggcgtacatgccgcagatgtcgtacacgtacaggggctccctcaacaccccgatgtaagtggggtaacagcgccccccgcggatgctggctcgcacgtagtcgtacatctcgtgagagggagccatgagcccgtctcccaagtgggtcttgcggggtttttcggcccggtagaggatctgcctgaagatggcgtgggagttggaagagatggtggggcgttggaagacgttaaagttggccccgggcagtcccacggagtcttggatgaactgggcgtaggattcccggagcttgtccaccagggctgcggttaccagcacgtcgagagcgcagtagtccaacgtctcgcggaccaggttgtaggccgtctcttgttttttctcccacagttcgcgattgaggaggtattcctcgcggtctttccagtactcttcggcgggaaatcctttttcgtccgctcggtaagaacctaacatgtaaaattcgttcacggctttgtatggacaacagcctttttctaccggcagggcgtacgcttgagcggcctttctgagagaggtgtgggtgagggcgaaggtgtcccgcaccatcactttcaggtactgatgtttgaagtccgtgtcgtcgcaggcaccctgttcccacagcgtgaagtcggtgcgctttttctgcctgggattggggagggcgaaggtgacgtcgttaaagaggattttcccggcacggggcatgaagttgcgagagatcctgaagggtccgggtacgtccgagcggttgttgatgacttgcgccgccaggacgatctcgtcgaagccgttgatgttgtggcccacgatgtaaagttcgataaagcgcggctgtcccttgagggccggcgcttttttcaactcctcgtaggtgagacagtccggcgaggagagacccagctccgcccgggcccagtcggagagctgagggttagccgcgaggaaagagctccataggtcaagggctagcagagtttgcaagcggtcgcgaaactcgcgaaactttttccccacggccattttctccggcgtcaccacgtagaaagtgcaggggcggtcgttccagacgtcccatcggagctctagggccagctcgcaggcttggcgaacgagggtctcctcgcccgagacgtgcatgaccagcatgaagggtaccaactgtttcccgaacgagcccatccatgtgtaggtttctacgtcgtaggtgacaaagagccgctgggtgcgcgcgtgggagccgatcgggaagaagctgatctcctgccaccagttggaggaatgggtgttgatgtggtgaaagtagaagtcccgccggcgcacagagcattcgtgctgatgtttgtaaaagcgaccgcagtagtcgcagcgctgcacgctctgtatctcctgaatgagatgcgcttttcgcccgcgcaccagaaaccggagggggaagttgagacgggggcttggtggggcggcatccccttcgccttggcggtgggagtctgcgtctgcgcccttcttctctgggtggacgacggtggggacgacgacgccccgtgtgccgcaagtccagatctccgccacggaggggcgcaggcgctgcaggagggggcgcagctgcccgctgtccagggagtcgagggcggccgcgctgaggtcgacgggaagcgtttgcaagttcactttcagaagaccggtaagagcgtgagccaggtgcaaatggtacttgatttccaggggggtgttggaagaggcgtccacggcgtagaggaggccgtgtccgcgcggggctaccaccgtgccccgaggagactttatctcactcgtcgagggcgagcgccggggggcagaggcggctctgcgccggggggcgatggaggcagaggcacgttttcgtgaggattcggcagcggttgatgacgagcccggagactgctggcgtgggcgacgacgcggcggttgaggtcctggatgtgctgtctctgcgtgaagaccaccggtccccgggtcctgaacctgaaagagagttccacagaatcaatgtctgcatcgttaacggcggcctgcctgaggatctcctgtacgtcgcccgagttgtcttgataggcgatctcggccatgaactgctccacttcttcctcgcggaggtcgccgtgacccgctcgctccacggtggcggccaggtcgttggagatgcgacgcatgagttgagagaaggcgttgaggccgttctcgttccacacgcggctgtacaccacgttgccgaaggagtcgcgcgctcgcatgaccacctgggccacgttgagttccacgtgacgggcgaagacggcgtagtttctgaggcgctgaaagaggtagttgagcgtggtggcgatgtgctcgcagacgaagaagtacatgatccagcgtcgcagggtcatctcgttgatgtctccgatggcttcgagacgctccatggcctcgtagaagtcgacggcgaagttgaaaaattgggagttgcgggcggctaccgtgagttcttcttgcaggaggcggatgagatcggcgaccgtgtcgcgtacctcctgttcgaaagcgccccgaggcgcctctgcttcttcctccggctcctcctcttccaggggcacaggttcctccgccagctctgcgacggggacggggcggcgacgtcgtcgtctgaccggcaggcggtccacgaagcgctcgatcatttcgccgcgccggcgacgcatggtctcggtgacggcgcgtccgttttcgcgaggtcgcagttcgaaaacgccgccgcgcagagcgcccccgtgcagggagggtaagtggttagggccgtcgggcagggacacggcgctgacgatgcattttatcaattgctgcgtaggcactccgtgcagggatctgagaacgtcgaggtcgacgggatccgagaacttctctaggaaagcgtctatccaatcgcaatcgcaaggtaagctgaggacggtgggccgctggggggcgtccgcgggcagttgggaggtgatgctgctgatgatgtaattaaagtaggcggtcttcaggcggcggatggtggcgaggaggaccacgtctttgggcccggcctgttgaatgcgcaggcgctcggccatgccccaggcctcgctctgacagcgacgcaggtctttgtagtagtcttgcatcagtctctccaccggaacctctgcttctcccctgtctgccatgcgagtcgagccgaacccccgcaggggctgcagcaacgctaggtcggccacgaccctctcggccagcacggcctgttgaatctgcgtgagggtggtctggaagtcgtccaggtccacgaagcggtgataggcccccgtgttgatggtgtaggtgcagttggccatgacggaccagttcacgacttgcatgccgggttgggtgatctccgtgtacttgaggcgcgagtaggccctggactcgaacacgtagtcgttgcatgtgcgcaccagatactggtagccgaccaggaagtgaggaggcggctctcggtacaggggccagccgacggtggcgggggcgccgggggacaggtcgtccagcatgaggcgatggtagtggtagatgtagcgggagagccaggtgatgccggccgaggtggtcgcggccctggtgaattcgcgaacgcggttccagatgttgcgcagggggcgaaagcgttccatggtgggcacgctctgccccgtgaggcgggcgcagtcctgtacgctctagatggaaaaaagacagggcggtcatcgactcccttccgtagctcggggggtaaagtcgcaagggtgcggcggcggggaaccccggttcgaaaccggccggatccgccgctcccgatgcgcctggccccgcatccacgacgtccgcgccgagacccagccgcgacgctccgccccaatacggaggggagtcttttggtgttttttcgtagatgcatccggtgctgcggcagatgcgaccccagacgcccaccaccaccgccgcggcggcagtaaacctgagcggaggcggtgacagggaggaggaggagctggctttagacctggaagagggagaggggctggcccggctgggagcgccgtccccagagagacaccctagggttcagctcgtgagggacgccaggcaggcttttgtgccgaagcagaacctgtttagggaccgcagcggtcaggaggcggaggagatgcgcgattgcaggtttcgggcgggtagagagctgagggcgggcttcgatcgggagcggctcctgagggcggaggatttcgagcccgacgagcgttctggggtgagcccggcccgcgctcacgtctcggcggccaacctggtgagcgcgtacgagcagacggtgaacgaggagcgcaacttccaaaagagctttaacaatcacgtgaggaccctgatcgcgagggaggaggtgaccatcgggctgatgcatctgtgggacttcgtggaggcctacgtgcagaacccggccagcaaacctctgacggcccagctgttcctgatcgtgcagcacagccgcgacaacgaaacgttccgcgacgccatgttgaacatcgcggagcccgagggtcgctggctcttggatctgattaacatcctgcagagcatcgtggtgcaggagaggggcctgagtttagcggacaaggtggcggccattaactattcgatgcagagcctggggaagttctacgctcgcaagatctacaagagcccttacgtgcccatagacaaggaggtgaagatagacagcttttacatgcgcatggcgctgaaggtgctgacgctgagcgacgacctcggcgtgtaccgtaacgacaagatccacaaggcggtgagcgccagccgccggcgggagctgagcgacagggagctgatgcacagcctgcagagggcgctggcgggcgccggggacgaggagcgcgaggcttacttcgacatgggagccgatctgcagtggcgtcccagcgcgcgcgccttggaggcggcgggctaccccgacgaggaggatcgggacgatttggaggaggcaggcgagtacgaggacgaagcctgaccgggcaggtgttgttttagatgcagcggccggcggacggggccaccgcggatcccgcaattttggcatccctgcaaagtcaaccttcgggcgtgaccgcctccgatgactgggcggcggccatggaccgcatcatggcgctgaccacccgcaaccccgaggcttttaggcagcaaccccaggccaaccgtttttcggccatcttggaagcggtggtaccgtcgcgcaccaacccgacgcacgagaaagtcctgactatcgtaaacgccctggtagacagcaaagctatccgccgcgacgaggcggggctgatctacaacgctctgttggaacgggtggcgcgctacaacagcactaacgttcagaccaatctggatcgcctcaccaccgacgtgaaggaggcgctggctcagaaggagcggtttctgagggacagcaatctgggatctctggtggcactcaacgccttcctgagcacgcagccggccaacgtgccccgcgggcaggaggactacgtgagcttcatcagcgctctgaggctgctggtgtccgaggtgccacagagcgaggtgtaccagtctgggccggattacttcttccagacgtcccgacagggcttgcaaacggtgaacctgactcaggcctttaaaaatttgcaaggcatgtggggcgtcaaggccccggtgggcgatcgcgccactatctccagtctgctgacccccaacactcgcctgctgctgctcttgatcgcgccgttcaccaacagtagcactatcagccgtgactcgtacctgggtcatctcatcactctgtaccgcgaggccatcggccaggctcagatcgacgagcatacgtatcaggagatcactaacgtgagccgggccctgggtcaggaagatatcggcagcctggaagccacgttgaactttttgctaaccaaccggaggcaaaaaataccctcccagttcacgttaagcgccgaggaggagaggattctgcgatacgtgcagcagtccgtgagtctgtacttgatgcgggagggcgccaccgcttccacggctttagacatgacggctcggaacatggaaccgtccttttactccgcccaccgaccgttcattaaccgtttgatggactacttccatcgcgcggccgccatgaacggggagtattttaccaatgccatcctgaatccgcattggatgcccccgtccggcttctacaccggggagtttgacctgcccgaagccgacgacggctttctgtgggacgacgtgtccgatagcattttcacgccggctaatcgccgattccagaagaaggagggcggagacgagctccccctctccagcgtggaagctgcctctaggggagagagcccctttcccagtctgtcttccgccagcagtggtcgtgtcacgcgcccacggttgccgggggagagcgactacctgaacgaccccttgctgcggccggctaggaagaaaaatttccccaacaacggggtggaaagcttggtggataaaatgaatcgttggaagacctacgcccaggagcagcgggagtgggaggacagtcagccgcgaccgctggttccgccgcactggcgtcgccagagagaagacccggacgactccgcagacgatagtagcgtgttggacctgggagggagcggagccaacccctttgctcacttgcaacccaaagggcgttcgagtcgcctgtactaataaaaaaagacgcggaaacttaccagagccatggccacagcgtgtgtcctttcttcctctctttcctcctcggcgcggcagaatgagaagagcggtgagagtcacgccggcggcgtatgagggtccgcccccttcttacgaaagcgtgatgggatcagcgaacgtgccggccacgctggaggcgccttacgttcctcccagatacctgggacctacggagggcagaaacagcatccgttactccgagctggcgcccctgtacgataccaccaaggtgtacctggtggacaacaagtcggcggacatcgcctccctgaattaccaaaacgatcacagcaactttctgactaccgtggtgcagaacaatgacttcaccccgacggaggcgggcacgcagaccattaactttgacgagcgttcccgctggggcggtcagctgaaaaccatcctgcacaccaacatgcccaacatcaacgagttcatgtccaccaacaagttcagggccaggctgatggttaaaaaggctaaaaaccagcctcccgagtacgaatggtttgagttcaccattcccgagggcaactattccgagaccatgactatcgatctgatgaacaatgcgatcgtggacaattacctgcaagtggggaggcagaacggggtgctggagagcgatatcggcgtaaaatttgataccagaaacttccgactggggtgggatcccgtgaccaagctggtgatgccaggcgtgtacaccaacgaggcttttcaccccgacatcgtgctgctgccggggtgcggtgtggacttcactcagagccgtttgagtaacctgttagggatcagaaagcgccgccccttccaagagggctttcagatcatgtatgaggacctggaaggaggtaacattccaggtttgctagacgtgccggcgtatgaagagagtgttaaacaggcggaggcgcagggacgagagattcgaggcgacacctttgccacggaacctcacgaactggtaataaaacctctggaacaagacagtaaaaaacggagttacaacattatatccggcactatgaataccttgtaccggagctggtttctggcttacaactacggcgatcccgagaagggagtgagatcatggaccatactcaccaccactgacgtgacctgcggctcgcagcaagtgtactggtccctgccggatatgatgcaagacccggtcaccttccgcccctccacccaggtcagcaactttccggtggtgggcaccgagctgctgcccgtccatgccaagagcttctacaacgagcaggccgtttactcgcaactcattcgccagtccaccgcgcttacccacgtgttcaatcgctttcccgagaaccagattctggtgcgccctcccgctcctaccattaccaccgtcagtgaaaacgttcccgccctcacagatcacggaaccctgccgctgcgcagcagtatcagtggagttcagcgcgtgaccatcaccgacgccagacgtcgaacctgtccctacgtttacaaagctcttggcgtagtggctcccaaagttctctctagtcgcaccttctaaacatgtccatcctcatctctcccgataacaacaccggctggggactgggctccggcaagatgtacggcggagccaaaaggcgctccagtcagcacccagttcgagttcggggccacttccgcgctccctggggagcttacaagcgaggactctctggccgaacggctgtagacgataccatagatgccgtgattgccgacgcccgccggtacaaccccggaccggtcgctagcgccgcctccaccgtggattccgtgatcgacagcgtggtggccggcgctcgggcctatgctcgccgcaagaggcggctgcatcggagacgtcgccccaccgccgccatgctggcagccagggccgtgctgaggcgggcccggagggtaggcaggagggctatgcgccgcgctgccgccaacgccgccgccggcagggcccgccgtcaggctgcccgccaggccgccgctgccatcgctagcatggccagacccaggagagggaacgtgtactgggtgcgcgattctgtaacgggagtccgagtgccggtgcgcagccgacctccccgaagttagaagatccaagctgcgaagacggcggtactgagtctccctgttgttattagcccaacatgagcaagcgcaagtttaaagaagaactgctgcagacgctggtgcctgagatctatggccctccggacgtgaagcctgacattaagccccgcgatatcaagcgtgttaaaaagcgggaaaagaaagaggaactcgcggtggtagacgatggcggagtggaatttattaggagttttgccccgcggcgcagggttcagtggaaagggcgacgggtacaacgcgttttgaggccgggcaccgcggtagtttttaccccgggagaacggtcggccgttaggggtttcaaaaggcagtacgacgaggtgtacggcgacgaggacatattggaacaggcggctcaacagattggagaattcgcctatggaaagcgctcgcgtcgcggagacttggccatcgctttagacagcggcaatcccacacccagcctcaaacccgtgacactgcaacaagtgctccccgtgagcgccagcacggacagcaagaggggaataaaaagagaaatggaagatctgcagcctaccatccagctcatggttcctaaacggcagaggctggaagaggtcctggagaagatgaaagtggaccccagcatagagccggacgtcaaagtcaggccgatcaaagaagtggcccctggactcggggtgcagacggtggatatccagatccccgtcacgtcagcttcaaccgccgtggaagccatggaaacgcaaaccgaaacccccgccgcggttggtaccaaagaagtggcgttgcaaaccgacccctggtacgaatttgccgccccccggcgtcagaggcgacccgctcgttacggccccgccaatgccatcatgccagaatatgcgctgcatccgtctatcctgcccacccccggctaccggggagtgacgtatcgcccgtcgggaacccgccgccgaacccgtcgccgccgccgctcccgtcgcgctctggcccccgtgtcggtgcgccgcgtgacccgccggggaaagacagtcaccattcccaacccgcgctaccaccctagcatcctttaatgactctgccgttttgcagatggctctgacttgccgcgtgcgccttcccgttccgcactatcgaggaagatctcgtcgtaggagaggcatggcgggcagtggtcgccggcgggctttgcgcaggcgcatgaaaggcggaattttacccgctctgatacccataatcgccgccgccatcggtgccatacccggcgtcgcttcagtggccttgcaagcagctcgtaataaataaacgaaggcttttgcacttatgacctggtcctgactattttatgcagaaagagcatggaagacatcaattttacgtcgctggctccgcggcacggctcgcggccgctcatgggcacctggaacgacatcggcaccagtcagctcaacgggggcgctttcaattgggggagcctttggagcggcattaaaaactttggctccacgattaaatcctacggcagcaaagcctggaacagtagtgctggtcagatgctccgagataagctgaaggacaccaactttcaagaaaaagtggtcaacggggtggtgaccggcatccacggcgcggtagatctcgccaatcaagcggtgcagaaagagattgataggcgtttggaaaattcgcgggtaccgccgcagaggggggatgaggtggaggtcgaggaagtagaagtagaggaaaagctgcccccgctggagaaagttcccggtgcgcctccaagaccgcagaagcggcccaggccagaactagaagaaactctggtgacggagagcaaggagcctccctcgtacgagcaagccttgaaagagggcgcctctccaccctcctacccgatgactaagccgatcgcacccatggctcgaccggtgtacggcaaggattacaagcccgtcacgctagagctgcccccaccgcccccttcgcgtccgacagtgcctccactgcctgccccgtcggcgggtcccgtgtctgcaccatccgctgtgcctctgccagccgcccgtcccgtggccgtggccactgccaggaaccccagaggccagagaggagccaactggcaaaacacgctgaacagcatcgtgggcctgggggtgaaaagcctgaaacgccgccgttgctattattaaaaagtgtagctaaaaaatttcccgttgtatacgcctcctatgttaccgccagagacgcgtgactgtcgccgcgagcgccgcttccaagatggccaccccatcgatgatgccgcagtggtcttacatgcacatcgccggccaggacgcctcggagtacctgagtcccggcctcgtgcagtttgcccgcgccaccgacacctacttcagcttgggaaacaagtttagaaaccccaccgtggcccccacccacgatgtgaccacggaccgctcgcagaggctcaccctgcgctttgtgcccgtagaccgggaggacaccgcgtactcttacaaagtgcgctacacgctggccgtaggggacaaccgagtgctggacatggccagcacctacttcgacatccggggggtgctggatcggggtcctagcttcaagccctactccggcaccgcttacaactccctggctcccaagggagctccaaactccgtagagtggccggataatactaaaacaaaagtgagagcccaagcaccgtttgtaagcgacgaaatcactaaagacggcataaaggttggaacagataccgcaaccacccaacaaagcatttacgccgataaaacgtatcaacctgaaccacaagtaggggaaacacagtggaacagcgatgtaggcactaatgataaagtggcaggaagagttttaaagaaaacgaccccaatgtatccttgttatggttcttacgcacgacccacgaacgaaaaaggagggcaggcgaaggctgacacccaagtggatatgcagttttttgccaccactgcagccaatacaacaccaaaagctgttctttatgctgaagatgttaacttagaaggtcccgatacgcacttggtgtttaaacccactgtgacagagggaacgacaagtgccgaagctttgctagcgcaacaagccgctccaaaccgtccaaattacattgcttttagggacaattttattggactaatgtattacaacagcacgggaaacatgggggtgcttgccggtcaggcttcgcagctaaatgcggtagtagatttgcaagatagaaatacggaactatcctaccagctgatgttggatgcactgggagacagaagtcgctacttttctatgtggaatcaagccgtagatagttatgatccagatgttagaattgtggaaaatcacggagtagaggacgaactaccaaactattgtttcccattgggaggaatggcggtcacagacacctactcccccataaaatccaataatggaagcggttggcaagtagacaacgatacgtttgccgacaggggggtggaaataggctcgggaaacatgttcgccatggagatcaatttgcaagccaacctgtggcgcagttttttgtattctaacattgggctatacctcccggactctttaaaattaacccctgacaacatcacactcccagaaaacaaaaacacctaccagtacatgaacgggcgtgtgacaccacccgggcttgtggacacatacgtcaatgtgggagcccgctggtcccccgatgttatggacagcatcaaccccttcaaccaccaccgcaatgctggccttcgctaccgttccatgctcctgggcaacggtcgctacgtaccattccacattcaggtgccccagaaattttttgccattaagaatcttttgctgctccccggttcctacacctacgagtggaacttccgcaaggacgtgaacatgattttgcaaagctcgctgggtaacgacctgcgagttgacggggccagcatacgcttcgacagcatcaacctgtatgctaactttttccccatggcccacaacacagcttccaccctggaagccatgctgcgcaacgacaccaatgaccagtccttcaacgactacctgtgcgcggccaacatgctgtatcccatccccgccaatgccaccagcgtgcccatctccatcccgtctcgcaactgggccgccttcaggggctggagttttacccgcctcaaaaccaaggagaccccctcgctgggctccgggttcgacccctactttgtctactccggctccattccctacctggacggtaccttctacctcaaccatacttttaagaaggtgtccatcatgtttgactcgtcggtcagctggcccggcaacgaccgcctgctaactccaaatgagtttgaaatcaagcgttcggtggacggtgaagggtacaacgtggcccagagcaacatgaccaaggactggttcctaattcagatgctcagccattacaacatcggctaccagggtttctacgtgcccgagaattacaaagaccgcatgtactccttctttagaaacttccaacctatgagccgtcaagtagtagatactgtggcttataaggactactatcaggacgttaagctcccctaccagcacaacaactcagggttcgtgggctacatgggtcccaccatgcgagaggggcaagcgtaccccgccaactacccctatcccctgattggggccaccgccgtacccagcctgacgcagaaaaagttcctctgtgaccgggtgatgtggaggatacccttctctagcaacttcatgtctatgggctccctcaccgacctggggcagaacatgctgtacgccaactccgctcacgccttggacatgacctttgaggtggatcccatggatgagcccacgcttctctatgttctgtttgaagtcttcgacgtggtgcgcatccaccagccgcaccgcggcgtcatcgaggccgtctacctgcgcacacctttctctgccggtaacgccaccacctaaagaagccgatgggctccagcgaacaggagctgcaggccattgttcgcgacctgggctgcgggccctactttttgggcaccttcgacaagcggttccccggcttcatgtccccccacaagccggcctgtgccatcgttaacacggccggacgggaaaccggggggggtccactggctcgccttcgcctggaacccgcgtaaccgcacctgctacctgttcgacccttttggtttctccgacgaaaggctgaagcagatctaccagttcgagtacgaggggctcctcaagcgcagcgctctggcctccacgcccgaccactgcgtcaccctggaaaagtccacccagacggtccaggggcccttctcggccgcctgcgggctattctgttgcatgtttttgcacgccttcgtgcactggcctcacacccccatggatcacaaccccaccatggatctgctcaccggagtgcccaacagcatgcttcacagcccccaggtcgcccccaccctgcgccgtaaccaggaacacctgtatcgctttctggggaaacactctgcctattttcgccgccaccggcagcgcatcgaacgggccacggccttcgaaagcatgagccaaagagtgtaatcaataaaaaccatttttatttgacatgctacgagcttctggcgtttttattaaaaatcgaagggttcgagggaggggtcctcgtgcccactggggagggacacgttgcgatactggaaacgggcgctccaacgaaactcggggatcaccagccgcggcaggggcacgtcttctaggttctgcttccaaaactgccgcaccagctgcagggctcccatgacgtcgggcgccgatatcttgaagtcgcagttagggccggagctcccgcggctgttgcggaacacggggttggcacactggaacaccatcacgctggggttgtgaatactagccagggccgttgggtcggtcacctccgacgcatccagatcctcggcgttgctcagggcgaacggggtcagcttgcacatctgccgcccgatctggggcaccaggtcgggtttgttgaggcaatcgcagcgcagagggatcaggatgcgacgctgcccgcgttgcatgatagggtaactcgctgccaggaactcctccatctgacggaaggccatctgggccttcgtgccctcggtgaaaaagagcccacaggacttgctagagaatacgttattgccgcagttgatgtcttccgagcagcagcgggcgtcttcattcttcagctgaaccacgttgcgaccccagcggttctggaccaccttggctttcgtaggatgctccttcaacgcccgctgaccgttctcgctggtcacatccatttccaccacgtgctccttgcagaccatctccactccgtggaagcagaacaggacgccctcctgccgggtattgcgatgctcccacacggcgcacccggtgggctcccagctcttgcgtttcacccccgcgtatgcttccatgtaagccatgaggaatctgcccatcagctcggtgaaggtcttctggttggtgaaggtcagcggcaggccgcggtgctcctcgttcaaccaagtttgacagatcttgcggtacacggctccctggtcgggcagaaacttaaaagcccctctgctctcgttgtccacgtggaacttctccatcaacaccgtcatgacttccatgcccttctcccaggcagtcaccagcggcgcgctctcggggttcttcaccaacacggcggtggaggggccctcgccggccccgacgtccttcatggtcattctttgaaactccacggtgccgtccgcgcggcgtactctgcgcatcggagggtagctgaagcccacctccaccacggtgccttcgccctcgctgtcggagacaatctccggggatggcggcggcgcaagtgttgccttgcgagccttcttcttgggagggagcggaggcacctcctgctcgcgctcggggctcatctcccgcaagtagggggttatggagctgcctgcttggttctgacggttggccattgtatcctaggcagaaagacatggagcttatgcgcgaggaaactttaaccgccccgtcccccgtcagcgacgaagatgtcatcgtcgaacaggacccgggctacgttacgccgcccgaggatctggaggggcctgaccggcgcgacgctagtgagcggcaggaaaatgagaaagagaaggcacagggctgctaccttctggacggcgacgttttgctaaagcatttcgccaggcagagcaccatagtcaaggaggccttgcaagaccgctccgaggtgcccttggacgtcgccgcgctctcccaggcctacgaggcgaaccttttctcgccccgagtgcctccgaagagacagcccaacggcacctgcgagcccaacccgcgactcaacttctaccccgtattcgccgtgcccgaggcgctggccacctatcacatctttttcaaaaaccagcgcatccccctctcgtgccgggccaaccgcaccgcggccgataggaagctcaggcttaaaaacggagccgacatacctgatatcacgtcgctggaggaagtgcccaagattttcgagggtctgggtcgagatgaaaagcgggcggcgaacgctctgcagaaagaacagaaagagagtcagaacgtgctggtggagctggagggggacaacgcgcgtctggccgtcctcaaacgctgcatagaagtctcccacttcgcctaccccgccctcaacttgccacccaaagttatgaaatcggtcatggatcagctgctcatcaagagagctgagcccctggatcccgaccaccccgaggcggaaaactcagaggacggaaagcccgtcgtcagcgacgaggagctcgagcggtggctggaaaccagggacccccaacagttgcaagagaggcgcaagatgatgatggcggccgtgctggtcaccgtggagctggaatgcctgcaacggtttttcagcgacgtggagacgctacgcaaaatcggggagtccctgcactacaccttccgccagggctacgtccgccaggcctgcaagatctccaacgtggagctcagcaacctggtctcctacatgggcatcctccacgagaaccgactggggcagagcgtgctgcactgcaccttgcaaggcgaggcgcggcgggactacgtgcgagactgcatctacctcttcctcaccctcacctggcagaccgccatgggcgtctggcagcagtgcttggaagagagaaacctcaaagagctagacaaactcctctgccgccagcggcgcgccctgtggtccggtttcagcgagcgcacggtcgccagcgctctggcggacatcatcttcccggagcgcctgatgaaaaccttgcaaaacggcctgccggatttcatcagtcaaagcattttgcaaaacttccgctcttttgtcctggaacgctccgggattttgcccgccatgagctgcgcgctaccctctgactttgtccccctctcctaccgcgagtgccctcccccactgtggagccactgctacctcttccaactggccaactttctggcctaccactccgacctcatggaagacgtaagcggagagggtttactggagtgccactgccgctgcaacctgtgcaccccccacagatcgctggcctgcaacaccgagctgctcagcgaaacccaggtcataggtaccttcgagatccagggaccccagcagcaagagggtgcttccggcttgaagctcactccggcgctgtggacctcggcttacttacgcaaatttgtagccgaggactaccacgcccacaaaattcagttttacgaagaccaatctcgaccaccgaaagcccccctcacggcctgcgtcatcacccagagcaagatcctggcccaattgcaatccatcaaccaagcgcgccgagatttccttttgaaaaagggtcggggggtgtacttagacccccagaccggcgaggaactcaacccgtccacactctccgtcgaagcagcccccccgagacatgccgcccaagggaaccgccaagcagctgatcgctcggcagagagcgaagaagcaagagctgctccagcagcaggtggaggacgaggaagagctgtgggacagccaggcagaggaggtgtcagaggacgaggaggagatggaaagctgggacagcctaggcgaggaggaggacgagctttcagaggaagaggcgaccgaagaaaaaccacctgcatccagcgcgccttctctgagccgacagccgaagccccggcccccgacgcccccggccggctcactcaaagccagccgtaggtgggacgccaccggatctccagcggcagcggcagcgggtaaggccaaacgcgagcggcgggggtattgctcatggcgggcccacaaaagcagtatcgtgaactgcttgcaacactgcgggggaaacatctcctttgcccgacgctacctcctcttccatcacggtgtggccttccctcgcaacgttctctattattaccgtcatctctacagcccctacgaaacgctcggagaaaaaagctaaggcctcctctgccgcgaggaaaaactccgccgccgctgccgccaaggatccaccggccaccgaggagctgagaaagcgcatctttcccactctgtatgctatctttcagcaaagccgcgggcagcaccctcagcgcgaactgaaaataaaaaaccgctccttccgctcactcacccgcagctgtctgtaccacaagagagaagaccagctgcagcgcaccctggacgacgccgaagcactgttcagcaaatactgctcagcgtctcttaaagactaaaagacccgcgctttttccccctcggccgccaaaacccacgtcatcgccagcatgagcaaggagattcccaccccctacatgtggagttatcagccccagatgggtctggccgcgggggccgcccaggactactccagcaagatgaactggctcagcgccggcccccacatgatctcacgagttaacggcatccgagcccaccgaaaccagattctcttagaacaggcggcaatcaccgccacaccccggcgccaactcaacccgcccagttggcccgccgcccaggtgtatcaggaaactccccgcccgaccacagtcctcctgccacgcgacgcggaggccgaagtcctcatgactaactctggggtacaattagcgggcgggtccaggtacgccaggtacagaggtcgggccgctccttactctcccgggagtataaagagggtgatcattcgaggccaaggtatccagctcaacgacgaggcggtgagctcctcaaccggtctcagacctgacggagtcttccagctcggaggagcgggccgctcttccttcaccactcgccaggcctacctgaccctgcagagctcttcctcgcagccgcgctccgggggaatcggcactctccagttcgtggaagagttcgttccctccgtctacttcaacccgttctccggctcacctggacgctacccagacgccttcattcccaactttgacgcagtgagtgaatccgtggacggctacgactgatgacagatggtgcggccgtgagagctcggctgcgacatctgcatcactgccgtcagcctcgctgctacgctcgggagccgatcgtcttcagctactttgagctgccggacgagcaccctcagggaccggctcacgggttgaaactcgagatcgagaacgcgctcgagtctcgcctcatcgacgccttcgccgcccggcctctcctggtagaaaccgaacgcgggaccactaccatcaccctgttctgcatctgccccacgcccggattacatgaagatctgtgttgtcatctttgcgctcagtttaataaaaactgaactttttgccgcaccttcaacgccatctgtgatttctacaacaaaaagttcttctggcaaaggtacacaaactgtattttattctaattctacctcatctatcgtgctgaactgcgcctgcactaacgaacttatccagtggattgcaaacggtagtgtgtgcaagtacttttgggggaacgagatagttagtagaaataacagcctttgcgagcactgcaactcctccacactaatcctttatcccccatttgttactggatggtatatgtgcgttggctccggtttaaatcctagttgctttcataagtggtttctacaaaaagagacccttcccaacaattctgtttctttttccaccctgtcctactgctgttctccctctggttactctttcaaacctctaattggtattttagctttgatactgataatctttattaactttataataattaacaccttacagtaaacatgcttgttatcctcctgctcgccacatttttcgctctctctcacgccagaacaagtattgttggcgcaggttacaatgcaactcttcaatctgcttacatgccagattccgaccagataccccatattacgtggtacttacaaacctccaaacctaattcttcattttatgaaggaaacaaactctgcgatgactccgacaacaggacgcacacatttccccacccttcactacaattcgaatgcgtaaacaaaagcttgaagctttacaacttaaagccttcagattctggcttgtatcatgctgtagttgaaaaaagtaatttagaagtccacagtgattacattgaattgatggttgtggacctgccacctccaaaatgtgaggtttcctcctcttaccttgaagttcaaggcgtggatgcctactgcctcatacacattaactgcagcaactctaaatatccagctagaatttactataatggacaggaaagtaatcttttttattatttaacaacaagcgctggtaacggtaaacagttacctgattattttactgctgttgttgaattttccacctacagagaaacgtatgccaagcggccttacaatttctcatacccgtttaacgacctttgcaatgaaatacaagcgctcgaaactggaactgattttactccaattttcattgctgccattgttgtgagcttaattaccattattgtcagcctagcattttactgcttttgcaagcccaaaaaacctaagtttgaaaaacttaaactaaaacctgtcattcaacaagtgtgattttgttttccagcatggtagctgcatttctacttctcctctgtctacccatcattttcgtctcttcaactttcgccgcagtttcccacctggaaccagagtgcctaccgccttttgacgtgtatttgattctcacctttgtttgttgtatatccatttgcagtatagcctgcttttttataacaatctttcaagccgccgactatctttacgtgcgaattgcttactttagacaccatcctgaatacagaaatcaaaacgttgcctccttactttgtttggcatgattaagctattgctgatacttaattatttacccctaatcaactgtaattgtccattcaccaaaccctggtcattctacacctgttatgataaaatccccgacactcctgttgcttggctttacgcagccaccgccgctttggtatttgtatctacttgccttggagtaaaattgtattttattctacacactgggtggctacatcccagagaagatttacctagatatcctcttgtaaacgcttttcaattacagcctctgcctcctcctgatcttcttcctcgagctccctctattgtgagctactttcaactcaccggtggagatgactgactctcaggacattaatattagtgtggaaagaatagctgctcagcgtcagcgagaaacgcgagtgttggaatacctggaactacagcaacttaaagagtcccactggtgtgagaaaggagtgctgtgccatgttaagcaggcagccctttcttacgatgtcagccttcagggacatgaactgtcttacactttgccttcgcaaaaacaaaccttctgcaccatgatgggctctacctccatcacaatcacccaacaaaccggacctgttgagggagctatcctgtgtcactgtcacgcgcctgattgtatgcccaagctaatcaaaactctctgtgctttaggtgatatatttaaaatgtaagccagtatcaataaacttaccttaaatttgacagcaattttttggtattatcattcagcagcaccactttaccctcttcccaactctcatatgggatatgatggtgggcggcaaacttcctccaaaccctgaaagaaatatcggtatccacttccttgtcctcacccacaattttcatcttttcatagatgaaaagaacccgagttgatgaagacttcaaccccgtctacccttatgacaccacaaccactccagccgttcctttcatatcacccccgtttgtaaacagtgacggtcttcaggaaaacccccccggagttttaagcctgcgaatagctaaacccctgtattttgacatggagagaaaactagccctttcacttggaagagggctaacaattaccgcgaacggacagttagaaagcacccagagcgtgcagactaacccgccgttaactgtcaccaataacaacacacttatcctacgctactcctcccctttaatcctaactgacaataatttaaccgtaggcttctcaagtcctctccgtgttatagacaacaaactgacattcacttttacctcacctctccgttatgaaaacgaaacccttaccttcaattacacagagccccttacacttatgaacagcaaccttgcgcttaacgtaaactcctctaaaggccttagggttgacgggggctcactaggtacaaacctaagtcctgacttaaggtttaacagcagtggagccatagcttttggtatacaaaccctatggacacccccgacctcaaatcctaactgcaccgtttacaccgaaagcgattccttacttagtctctgtttaactaaatgcggagctcacgttttaggaagtgtaagcttaaccggggtagcaggtaccatgacaaacatggctgaaacttcgcttgctattgaatttacgtttgacgacactggaaaactacttcactcaccacttgttaacaacacttttagcattcgtcagggcgacagccccgcctcaaatcctacctacaatgctctagcatttatgccaaacagtaccctctacgctagaggaggaagtggtgaaccccgaaacaattactacgtccaaacatacctcaggggaaatgttcagagaccgattaccctcactgttactttcaactcagccgccacggggtattccttatcttttaagtggactgctgttgtacgtgaaaaatttgcagctcctgcaacttcattttgctacattaccgaacaataaaaccctgtgttcccaccgtttcgttttttccagatgaaacgggccagagttgatgaagacttcaacccagtgtacccttatgaccccccacatgctcccgttatgcccttcattactccaccttttacctcctcggatgggttacaggaaaaaccacttggagtgttaagtttaaactacagagatcccattactacgcaaaatgggtctcttacaattaaactaggaaacggcctcactctagacaaccagggacaactaacatcaaccgctggggaagtagaacctccactcactaacgctaacaacaaacttgcactggtctatagggaacctttagcagtaaagcgcaacagcctaaccttatcgcacaccgctccccttgttattgctgataactctttagcattgcaagtttcagagcctatttttataaatgacaaggacaaactagccctgcagacagccgcgccccttgtaactaacgctggcacccttcgcttacagagcgccgcccctttaggcattgcagaccaaaccctaaaactcctgtttaccaaccctttgtacttgcagaataactttctcacgttagccattgaacgaccccttgccattaccaatactggaaagctggctctacagctctccccaccgctacaaacagcagacacaggcttgactttgcaaaccaacgtgccattaactgtaagcgacgggaccctaggcttagccataaagcgcccacttattgttcaggacaacaacttgtttttggacttcagagctcccctgcgtcttttcaacagcgaccccgtactagggcttaacttttacacccctcttgcagtgcgcgatgaggcgctcactgttaacacaggccgcggcctcacagtgagttacgatggtttaattttaaatcttggtaaggatcttcgcttcgacaacaacaccgtttctgtcgctcttagtgctgctttgcctttacaatacactgatcagcttcgccttaacgtgggcgctgggctgcgttacaatccagtgagtaaaaaattggacgcgaaccccaatcaaaacaagggtttaacctgggaaaatgactacctcattgtaaagctaggaaatggattaggttttgatggcgatggaaacatagctgtttctcctcaagttacatcgcctgacaccttatggaccactgccgatccatcccccaattgttccatctacactgatttagatgccaaaatgtggctctcgttggtaaaacaagggggtatggttcacggttctgttgctttaaaagcattgaaaggaaccctattgagtcctacggaaagtgccattgttattatactacattttgacaattatggagtgcgaattctcaattatcccactttgggcactcaaggcacgttgggaaataatgcaacttggggttataggcagggagaatctgcagacactaatgtactcaatgcactagcatttatgcccagttcaaaaaggtacccaagagggcgtggaagcgaagttcagaatcagactgtgggctacacttgtatacagggtgacctttctatgcccgtaccgtaccaaatacagtacaactatggaccaactggctactcctttaaatttatttggagaactgtttcaagacaaccatttgacatcccatgctgttttttctcttacattacggaagaataaaacaacttttcctttttattttctttttattttacacgcacagtaaggcttcctccgcccttccatttgacagcatacaccagcctctctcccttcatggcagtaaactgctgcgagccagtccggtatttgggagttaagatccaaacagtctctttggtaatcagatgtcgatccgtgatggacacaaatccctggggcaggttctccaacgtttcggtgaaaaactgcatgccgtcctacaaaacaaacaggttcaggctctccacgggttatctccccgatcaaactcagacagggtaaaggtgcgatgatgttccactaaaccacgcaggtggcgctgtctgaacctctcggtgcgactcctgtgaggctggtaagaagttagattgtccagcagcctcacagcatggatcatcagtctacgagtgcgtctggcgcagcagcgcatctgaatctcactgagattccggcaagaatcgcacaccatcacaatcaggttgttcatgatcccatagctgaacacgctccagccaaagctcattcgctccaacagcgccaccgcgtgtccgtccaaccttactttaacataaatcaggtgtctgccgcgtacaaacatgctacccgcatacagaacctcccggggcagtcccctgttcaccacctgcctgtaccagggaaacctcacatttatcagggagccatagatagccatcttaaaccaattagctaacaccgccccaccagctctacactgaagagaaccgggagagttacaatgacagtgaataatccatctctcataacccctaatggtctgatggaaatccagatctaacgtggcacagcagatacacactttcatatacattttcatcacatgtttttcccaggccgttaaaatacaatcccaatacacgggccactcctgcagtacaataaagctaatacaagatggtatactcctcacctcactaacattgtgcatgttcatattttcacattctaagtaccgagagttctcctctacaacagcactgccgcggtcctcacaaggtggtagctggtgacgattgtagggagccagtctgcagcgataccgtctgtcgcgttgcatcgtagaccagggaccgacgcacttcctcgtacttgtggtagcagaaccacgtccgccgccaacaggtctccacgtaacgccggtccctgcgtcgctcgcgctctctcctcagtgcaaagtgcaaccactcttgtaatccacacagatccctctcggcctccggggcgatgcacacctcaaacctacagatgtctcggtacagttccaaacacgtagtgagggcgagttccaaccaagacagacagcctgatctatcccgacacactggaggtggaggaagacacggaagaggcatgttattccaagcgattcaccaacgggtcgaaatgaagatcccgaagatgacaacggtcgcctccggagccctgatggaatttaacagccagatcaaacattatgcgattttccaggctatcaatcgcggcctccaaaagagcctggacccgcacttccacaaacaccagcaaagcaaaagcgttattatcaaactcttcgatcatcaagctgcaggactgtacaatgcccaagtaattttcatttctccactcgcgaatgatgtcgcggcaaatagtctgaaggttcatgccgtgcatattaaaaagctccgaaagggcgccctctatagccatgcgtagacacaccatcatgactgcaagatatcgggctcctgagacacctgcagcagatttaacagacccaggtcaggttgctctccgcgatcgcgaatctccatccgcaaggtcatttgcaaataattaaatagatctgcgccgactaaatctgttaactccgcgctaggaactaaatcaggtgtggctacgcagcacaaaagttccagggatggcgccaaactcactagaaccgctcccgagtagcaaaactgatgaatgggagtaacacagtgtaaaatgttcagccaaaaatcactaagctgctcctttaaaaagtccagtacttctatattcagtccgtgcaagtactgaagcaactgtgcgggaatatgcacagcaaaaaaaatagggcggctcagatacatgttgacctaaaataaaaataaacattaaactaaagaagcttggcgaacggtgggatatatgacacgctccagcagcaggcaagcaaccggctgtccccgggaaccgcggtaaaattcatccgaatgattaaaaagaacaacagaaacttcccaccatgtactcggttggatctcctgagcacacagcaatacccccctcacattcatatccgccacagaaaaaaaacgtcccagatacccagtgggaatatccaacgacagctgcaaagacagcaaaataatccctctgggagcaagcacaaaatcctccggtgaaaaaagaacatacatattagaataaccctgttgctggggcaaaaaggcccgacgtcccagcaaatgcacatatatatgttgatcagccattgccccgtcttaccgcgtataaagccacgaaaaagtcgagctaaaatccacccaacagcctatagctatatatacactccgcccaatgacgctaacaccgcaccacccacgaccaaagttcacccacacccacaaaacccgcgaaaatccagcgccgtcagcacttccgcaatttcagtctcacaacgtcacttccgcgcgccttttcactttcccacacacgcccttcgcccgccctcgcgccaccccgcgtcaccccgcgtcaccgcacgtcaccccggccccgcctcgctcctccccgctcattatcatattggcacgtttccagaataaggtatattattgatgatggccaagctatttaggtgacactatagaatactcaagctatgcatcaagcttggtaccgagctcggatccactagtaacggccgccagtgtgctggaattcgcccttgtttaaacgcgatcg

SEQ ID NO: 33 - DNA, 500 bp, Adenovirus A12
  MISC_FEATURE (1)..(500): 500bp 5 UTR
ctgcaggttaattaaggaagggcgaattctgcagatatccatcacactggcggccgctcgagcatgcatctagagggcccaattcgccctatagtgagtcgtattacaattcactggcccctatctaataatataccttatactggactagtgccaatattaaaatgaagtgggcgtagtgtgtaatttgattgggtggaggtgtggctttggcgtgcttgtaagtttgggcggatgaggaagtggggcgcggcgtgggagccgggcgcgccggatgtgacgttttagacgccattttacacggaaatgatgttttttgggcgttgtttgtgcaaattttgtgttttaggcgcgaaaactgaaatgcggaagtgaaaattgatgacggcaattttattataggcgcggaatatttaccgagggcagagtgaactctgagcctctacgtgtgggtttcgatacgtgagcgacggggaaactccacgttggcgctcaaaggg

SEQ ID NO: 34 - DNA, 500 bp, Adenovirus A18
  MISC_FEATURE (1)..(500): 500bp 5 UTR
cgatcgcgtttaaacaagggcgaattccagcacactggcggccgttactagtggatccgagctcggtaccaagcttgatgcatagcttgagtattctatagtgtcacctaaatagcttggccctatctaaatatataccttatactggactagagccaatattaaaatgaagtgggtgtggcgatgtactttgattgggtggaggtgtggcctgggcgtgtttgtaagtttgggcggatgaggaagttgggcgcggcgtgggagccgggcgcgccggatgtgacgtgtttaacgccattttaatgcggaaatgatgtgttttgggcgttggttgtgaaaattctgtatttttggcgcgaaaacctgaaatacggaagtgaaaactgatgacgacagtttattataggcgcgtaatatttaccgagggcagagtgaactttgagcctctacgtgtgggtttcggtacgtgagtgttagggaatgtccacgttggcgttcaa

SEQ ID NO: 35 - DNA, 500 bp, Adenovirus A31
  MISC_FEATURE (1)..(500): 500bp 5 UTR
cgatcgcgtttaaacaagggcgaattccagcacactggcggccgttactagtggatccgagctcggtaccaagcttgatgcatagcttgagtattctatagtgtcacctaaatagcttggccatcatcaataatataccttacactggacttgagccaatattaaaatgaagtgggcggagtgaatagttaattgaccgtaggcgtggtttgcaagtttgccgaagccggatgtgacgcgtgtgggagccgggcgcgccggatgtgacgcgttagtcgccatttttataggaaatgacatgttttttgggcgttgttgtgtaagttttgtgtttttggcggtaaaagtgatttgcggaagtgaaaactgtttacgtcagttttattataggcgagtaatatttaccgagggcaaagtgaactttgagccactacgtggtggtttcgatacgtgagcgatagggaaactccacgttggtgtccaaaggacacgtttattgt

SEQ ID NO: 36 - DNA, 500 bp, Adenovirus B3
  MISC_FEATURE (1)..(500): 500bp 5 UTR
tttaaacctatctatataatataccttatagatggaatggtgccaacatgtaaatgaggtaatttaaaaaagtgcgcgctgtgtggtgattggctgcggggttaacggctaaaaggggcggcgcgaccgtgggaaaatgacgtgacttatgtgggaggagttatgttgcaagttattacggtaaatgtgacgtaaaacgaggtgtggtttgaacacggaagtagacagttttcccacgcttactgacaggatatgaggtagttttgggcggatgcaagtgaaaattctccattttcgcgcgaaaactaaatgaggaagtgaatttctgagtcatttcgcggttatgccagggtggagtatttgccgagggccgagtagactttgaccgtttacgtggaggtttcgattaccgtgtttttcacctaaatttccgcgtacggtgtcaaagttctgtgtttttacgtaggtgtcagctgatcgctagggtatttaaacctgac

SEQ ID NO: 37 - DNA, 500 bp, Adenovirus B7
  MISC_FEATURE (1)..(500): 500bp 5 UTR
agaccaaaacgatctcaagcgatcgcgtttaaacaagggcgaattccagcacactggcggccgttactagtggatccgagctcggtaccaagcttgatgcatagcttgagtattctatagtgtcacctaaatagcttggccatcatcaataatataccttatagatggaatggtgccaacatgtaaatgaggtaatttaaaaaagtgcgcgctgtgtggtgattggctgtggggtgaatgactaacatgggcggggcggccgtgggaaaatgacgtgacttatgtgggaggagttatgttgcaagttattgcggtaaatgtgacgtaaaaggaggtgtggtttgaacacggaagtagacagttttcccacgcttactgataggatatgaggtagttttgggcggatgcaagtgaaaattctccattttcgcgcgaaaactgaatgaggaagtgaatttctgagtcatttcgcggttatgacagggtggagtatttgccga

SEQ ID NO: 38 - DNA, 500 bp, Adenovirus B16
  MISC_FEATURE (1)..(500): 500bp 5 UTR
cctgcaggcattatcaataatataccttatagatggaatggtgccaacatgtaaatgaggtaatttaaaaaagtgcgcgctgtgtggtgattggctgcggggtgaacggctaaaaggggcgggcaatgctgggatgtgacgtaacttatgtgggaggagttatgttgcaagttatcgcggtaaaggtgacgtaaaacgaggtgtggtttggacacggaagtagacagttttcccacgtttactgacaggatatgaggtagttttgggcggatgcaagtgaaaattctccattttcgcgcgaaaactgaatgaggaagtgaatttctgagtcatttcgcggttatgacagggtggagtatttgccgagggccgagtagactttgaccgtttacgtggaggtttcgattaccgtgtttttcacctaaatttccgcgtacggtgtcaaagtcctgtgtttttacgtaggtgtcagctgatcactagggtatttaaacctgtcg

SEQ ID NO: 39 - DNA, 500 bp, Adenovirus B21
  MISC_FEATURE (1)..(500): 500bp 5 UTR
ctgcaggttaattaaggaagggcgaattctgcagatatccatcacactggcggccgctcgagcatgcatctagagggcccaattcgccctatagtgagtcgtattacaattcactggcctattatataatataccttatagatggaatggtgccaatatgcaaatgaggtaatttaaaaaagtgcgcgctgtgtggtgattggctgcggggttaacggctaaaaggggcgggcaatgctgggaggtgacgtaacttatgtaggaggagttatgttgcaagttatcgcggtaaaggtgacgtaaaacgaggtgtggtttggacacggaagtagacagttttcccacgcttactgacaggatatgaggtagttttgggcggatgcaagtgaaaattctccattttcgcgcgaaaactgaatgaggaagtgaatttctgagtcatttcgcggttatgacagggtggagtatttgccgagggccgagtagactttgaccgttta

SEQ ID NO: 40 - DNA, 500 bp, Adenovirus B50
  MISC_FEATURE (1)..(500): 500bp 5 UTR
ctgcaggttaattaaggaagggcgaattctgcagatatccatcacactggcggccgctcgagcatgcatctagagggcccaattcgccctatagtgagtcgtattacaattcactggcccaatcaatataatataccttatagatggaatggtgccaatatgtaaatgaggtaatttaaaaaagtgcgcgctgtgtggtgattggctgcggggtgaacggctaaaaggggcggacatgctgggaggtgacgtgacttatgggggaggagttatgttgcaagttatcgcggtaaaggtgacgtaaaacgaggtgtggtttggacacggaagtagacagttttcccacgcttactgacaggatatgaggtagttttgggcggatgcaagtgaaaattctccattttcgcgcgaaaactgaatgaggaagtgaatttctgagtcatttcgcggttatgacagggtggagtatttgccgagggccgagtagactttgaccgttt

SEQ ID NO: 41 - DNA, 500 bp, Adenovirus B11
  MISC_FEATURE (1)..(500): 500bp 5 UTR
cgatcgcgtttaaacaagggcgaattccagcacactggcggccgttactagtggatccgagctcggtaccaagcttgatgcatagcttgagtattctatagtgtcacctaaatagcttggccatcatcaataatataccttatagatggaatggtgccaatatgtaaatgaggtgattttaaaaagtgtggatcgtgtggtgattggctgtggggttaacggctaaaaggggcggtgcgaccgtgggaaaatgacgttttgtgggggtggagtttttttgcaagttgtcgcgggaaatgtgacgcataaaaaggcttttttctcacggaactacttagttttcccacggtatttaacaggaaatgaggtagttttgaccggatgcaagtgaaaattgttgattttcgcgcgaaaactgaatgaggaagtgtttttctgaataatgtggtatttatggcagggtggagtatttgttcagggccaggtagactttgacccat

SEQ ID NO: 42 - DNA, 500 bp, Adenovirus B14a
  MISC_FEATURE (1)..(500): 500bp 5 UTR
ctgcaggttaattaaggaagggcgaattctgcagatatccatcacactggcggccgctcgagcatgcatctagagggcccaattcgccctatagtgagtcgtattacaattcactggcccatcatcaataatataccttatagatggaatggtgccaatatgtaaatgaggtgattttaaaaagtgtgggctgtgtggtaattggctgtggggttaacggctaaaaggggcggcgcggccgtgggaaaatgacgttttttgggggtggagtgtttttgcaagttgtcgcggtaaatgtgacgcaaacaaaggctttttttttacggaactacttagtgttcccacggtatttaacaggaaatgaggtagttttggccggatgcaagtaaaaattgttcattttcgcgcgaaaactgaatgaggaagtggttttctgaataatgcggtatttatggcagggtggagtatttgttcagggccaggtagactttgacccatta

SEQ ID NO: 43 - DNA, 500 bp, Adenovirus B14b; identical to SEQ ID NO: 42
  MISC_FEATURE (1)..(500): 500bp 5 UTR

SEQ ID NO: 44 - DNA, 500 bp, Adenovirus B34
  MISC_FEATURE (1)..(500): 500bp 5 UTR
aattgctgatttgcgcgcgaaaactgaatgaggaagtgtttttctgaataatgtggtatttatggcagggtggagtatttgttcagggccaggtagactttgacccattacgtggaggtttcgattaccgtgttttttacctgaatttccgcgtaccgtgtcaaagtcttctgtttttacgtaggtgtcagctgatcgctacggtatttatacctcagggtttgtgtcaagaggccactcttgagtgccagcgagaacatcatcaataatataccttatagatggaatggtgccaatatgtaaatgaggtgattttaaaaattgtggggtgtgtggtgattggctgtggggttaacggctaaacggggcggcgcggccgtgggaaaatgacgttttgtgggggtggagtttttttgcaagttgtcgcgggaaatgtgacgcataaaaaggctttttttctcacggaactactgacttttcccacggtatttaacaggaaa

SEQ ID NO: 45 - DNA, 500 bp, Adenovirus B35
  MISC_FEATURE (1)..(500): 500bp 5 UTR
cgatcgcgtttaaacaagggcgaattccagcacactggcggccgctcgagcatgcatctagagggcccaattcgccctatagtgagtcgtattacaatgcactggcccatcatcaataatataccttatagatggaatggtgccaatatgtaaatgaggtgattttaaaaagtgtgggccgtgtggtgattggctgtggggttaacggttaaaaggggcggcgcggccgtgggaaaatgacgttttatgggggtggagtttttttgcaagttgtcgcgggaaatgttacgcataaaaaggcttcttttctcacggaactacttagttttcccacggtatttaacaggaaatgaggtagttttgaccggatgcaagtgaaaattgctgattttcgcgcgaaaactgaatgaggaagtgtttttctgaataatgtggtatttatggcagggtggagtatttgttcagggccaggtagactttgacccattacgtggaggttt

SEQ ID NO: 46 - DNA, 500 bp, Adenovirus C1
  MISC_FEATURE (1)..(500): 500bp 5 UTR
ttaattaacatcatcaataatataccttattttggattgaagccaatatgataatgagggggtggagtttgtgacgtggcgcggggcgtgggaacggggcgggtgacgtagtagtgtggcggaagtgtgatgttgcaagtgtggcggaacacatgtaagcgacggatgtggtaaaagtgacgtttttggtgtgcgccggtgtacacgggaagtgacaattttcgcgcggttttaggcggatgttgtagtaaatttgggcgtaaccgagtaagatttggccattttcgcgggaaaactgaataagaggaagtgaaatctgaataattctgtgttactcatagcgcgtaatatttgtctagggccgcggggactttgaccgtttacgtggagactcgcccaggtgtttttctcaggtgttttccgcgttccgggtcaaagttggcgttttattattatagtcagctgacgtgtagtgtatttatacccggtgagttcctcaa

SEQ ID NO: 47 - DNA, 500 bp, Adenovirus C2
  MISC_FEATURE (1)..(500): 500bp 5 UTR
tttaaatcatcatcaataatataccttattttggattgaagccaatatgataatgagggggtggagtttgtgacgtggcgcggggcgtgggaacggggcgggtgacgtagtagtgtggcggaagtgtgatgttgcaagtgtggcggaacacatgtaagcgccggatgtggtaaaagtgacgtttttggtgtgcgccggtgtatacgggaagtgacaattttcgcgcggttttaggcggatgttgtagtaaatttgggcgtaaccaagtaatatttggccattttcgcgggaaaactgaataagaggaagtgaaatctgaataattctgtgttactcatagcgcgtaatatttgtctagggccgcggggactttgaccgtttacgtggagactcgcccaggtgtttttctcaggtgttttccgcgttccgggtcaaagttggcgttttattattatagtcagctgacgcgcagtgtatttatacccggtgagttcctcaag

SEQ ID NO: 48 - DNA, 500 bp, Adenovirus C5
  MISC_FEATURE (1)..(500): 500bp 5 UTR
ttaattaacatcatcaataatataccttattttggattgaagccaatatgataatgagggggtggagtttgtgacgtggcgcggggcgtgggaacggggcgggtgacgtagtagtgtggcggaagtgtgatgttgcaagtgtggcggaacacatgtaagcgacggatgtggcaaaagtgacgtttttggtgtgcgccggtgtacacaggaagtgacaattttcgcgcggttttaggcggatgttgtagtaaatttgggcgtaaccgagtaagatttggccattttcgcgggaaaactgaataagaggaagtgaaatctgaataattttgtgttactcatagcgcgtaatatttgtctagggccgcggggactttgaccgtttacgtggagactcgcccaggtgtttttctcaggtgttttccgcgttccgggtcaaagttggcgttttattattatagtcagctgacgtgtagtgtatttatacccggtgagttcctcaa

SEQ ID NO: 49 - DNA, 500 bp, Adenovirus C6
  MISC_FEATURE (1)..(500): 500bp 5 UTR
ttttaaatcatcatcaataatataccttattttggattgaagccaatatgataatgagggggtggagtttgtgacgtggcgcggggcgtgggaacggggcgggtgacgtagtagtgtggcggaagtgtgatgttgtaagtgtggcggaacacatgtaagcgccggatgtggtaaaagtgacgtttttggtgtgcgccggtgtacacgggaagtgacaattttcgcgcggttttaggcggatgttgtagtaaatttgggcgtaaccaagtaatatttggccattttcgcgggaaaactgaataagaggaagtgaaatctgaataattctgtgttactcatagcgcgtaatatttgtctagggccgcggggactttgaccgtttacgtggagactcgcccaggtgtttttctcaggtgttttccgcgttccgggtcaaagttggcgttttattattatagtcagctgacgcgcagtgtatttatacccggtgagttcctcaa

SEQ ID NO: 50 - DNA, 500 bp, Adenovirus D8
  MISC_FEATURE (1)..(500): 500bp 5 UTR
cgatcgcgtttaaacaagggcgaattccagcacactggcggccgttactagtggatccgagctcggtaccaagcttgatgcatagcttgagtattctatagtgtcacctaaatagcttggcctatctatataatataccccacaaagtaaacaaaagttaatatgcaaatgagcttttaaattttaacggttttagggcagggccaacgttaagtggttaacaagcggtaatgcagttgacgtcaagacatcatcataatataccccacaaagtaaacaaaagttaatatgcaaatgagcttttaaattttaacggttttagggcagggccaacgttaagtggttaacaagcggtaatgcagttgacgtcaagacatcatcataatataccccacaaagtaaacaaaagttaatatgcaaatgagcttttaaattttaacggttttagggcagggccaacgttaagtggttaacaagcggtaatgcagttgacgtcaaga

SEQ ID NO: 51 - DNA, 500 bp, Adenovirus D9
  MISC_FEATURE (1)..(500): 500bp 5 UTR
ctgcaggttaattaaggaagggcgaattctgcagatatccatcacactggcggccgctcgagcatgcatctagagggcccaattcgccctatagtgagtcgtattacaattcactggccccatctatataatataccccacaaagtaaacaaaagttaatatgcaaatgagcttttgaattttaacggtttcggggcggagccaacgctgattggacgagagaagacgatgcaaatgacgtcacgacgcacggctaacggtcgccgcggaggcgtggcctagcccggaagcaagtcgcggggctgatgacgtataaaaaagcggactttagacccggaaacggccgattttcccgcggccacgcccggatatgaggtaattctgggcggatgcaagtgaaattaggtcattttggcgcgaaaactgaatgaggaagtgaaaagcgaaaaataccggtccctcccagggcggaatatttaccgagggccgagagactttga

SEQ ID NO: 52 - DNA, 500 bp, Adenovirus D10
  MISC_FEATURE (1)..(500): 500bp 5 UTR
catcatcaataatataccccacaaagtaaacaaaagttaatatgcaaatgaggttttaaatttagggcggggctactgctgattggccgagaaacgttgatgcaaatgacgtcacgacgcacggcgttaacggtcgccgcggaggcgtggcctagcccggaagcaagtcgcggggctgatgacgtataaaaaagcggactttagacccggaaacggccgattttcccgcggccacgcccggatatgaggtaattctgggcggatgcaagtgaaattaggtcattttggcgcgaaaactgaatgaggaagtgaaaagcgaaaaataccggtccctcccagggcggaatatttaccgagggccgagagactttgaccgattacgtgggggtttcgattgcggtgtttttttcgcgaatttccgcgtccgtgtcaaagtccggtgtttatgtcacagatcagctgatccgcagggtatttaaaccagtcgagtccgtcaagag

SEQ ID NO: 53 - DNA, 500 bp, Adenovirus D13
  MISC_FEATURE (1)..(500): 500bp 5 UTR
catcatcaataatataccccacaaagtaaacaaaagttaatatgcaaatgaggttttaaatttagggcggggctactgctgattggccgagaaacgttgatgcaaatgacgtcacgacgcacggctaacggtcgccgcggaggcgtggcctagcccggaagcaagtcgcggggctgatgacgtataaaaaagcggactttagacccggaaacggccgattttcccgcggctacgcccggatatgaggtaattctgggcggatgcaagtgaaattaggtcattttggcgcgaaaactgaatgaggaagtgaaaagtgaaaaataccgggcccgcccagggcggaatatttaccgagggccgagagactttgaccgattacgtgggggtttcgattgcggtgtttttttcgcgaatttccgcgtccgtgtcaaagtccggtgtttatgtcacagatcagctgatccacagggtatttaaaccagtcgagcccgtcaagaggc

SEQ ID NO: 54 - DNA, 500 bp, Adenovirus D17
  MISC_FEATURE (1)..(500): 500bp 5 UTR
catcatcaataatataccccacaaagtaaacaaaagttaatatgcaaatgaggttttaaatttagggcggggctactgctgattggccgagaaacgttgatgcaaatgacgtcacgacgcacggctaacggtcgccgcggaggcgtggcctagcccggaagcaagtcgcggggctgatgacgtataaaaaagcggactttaaacccggaaacggccgattttcccgcggccacgcccggatatgaggtaattctgggcggatgcaagtgaaattaggtcattttggcgcgaaaactgaatgaggaagtgaaaagtgaaaaataccggtcccgcccagggcggaatatttaccgagggccgagagactttgaccgattacgtgtgggtttcgattgcggtgttttttcgcgaatttccgcgtccgtgtcaaagtccggtgtttatgtcacagatcagctgatccacagggtatttaaaccagtcgagcccgtcaagaggcc

SEQ ID NO: 55 - DNA, 500 bp, Adenovirus D20
  MISC_FEATURE (1)..(500): 500bp 5 UTR
catcatcaataatataccccacaaagtaaacaaaagttaatatgtaaatgagcttttgaatttagggcggggccgacgctgattggccgttgcaagaaccgttagtgacgtcacgacgcacggccgacggccgccgcggaggcgtggcctagtccggaagcaagtcgcggggctgatgacgtataaaaaagcggactttagacccggaaacggccgattttcccgcggccacgcccggatatgaggtaattctgggcggatgcaagtgaaattaggccattttggcgcgaaaactgaatgaggaagtgaaaagtgaaaaataccgggcccgcccagggcggaatatttaccgagggccgagagactttgaccgattacgtgggggtttcgattgcggtgttttttcgtgaatttccgcgtccgtgtcaaagtccggtgtttatgtcacagatcagctgatccacagggtatttaaaccagtcgatcccgtcaagaggcca

SEQ ID NO: 56 - DNA, 500 bp, Adenovirus D24
  MISC_FEATURE (1)..(500): 500bp 5 UTR
catcatcaataatataccccacaaagtaaacaaaagttaacatgcaaatgagcttttgaatttagggcggggccagcgctgattggacgagagaagatgatgcaaatgacgtcacgacgcacggctaacggtcgccgcggaggcgtggcctagcccggaagcaagtcgcggggctgatgacgtataaaaaagcggactttagacccggaaacggccgattttcccgcggccacgcccggatatgaggtaattctgggcggatgcaagtaaaattaggtcattttggcgcgaaaactgaatgaggaagtgaaaagtgaaaaataccggtcccgcccagggcggaatatttaccgagggccgagagactttgaccgattacgtgggggtttcgattgcggtgttttttcgcgaatttccgcgtccgtgtcaaagtccggtgtttatgtcacagatcagctgatccacagggtatttaaaccagtcgagcccgtcaagaggcc

SEQ ID NO: 57 - DNA, 500 bp, Adenovirus D25
  MISC_FEATURE (1)..(500): 500bp 5 UTR
catcatcaataatataccccacaaagtaaacaaaagttaatatgcaaatgaggttttaaatttagggcggggctactgctgattggccgagaaacgttgatgcaaatgacgtcacgacgcacggctaacggtcgccgcggaggcgtggcctaggccggaagcaagtcgcggggctgatgacgtataaaaaagcggactttagacccggaaacggccgattttcccgcggccacgcccggatatgaggtaattctgggcggatgcaagtgaaattaggtcattttggcgcgaaaactgaatgaggaagtgaaaagcgaaaaataccggtcccgcccagggcggaatatttaccgagggccgagagactttgaccgattacgtgggggtttcgattgcggtgtttttttcgcgaatttccgcgtccgtgtcaaagtccggtgtttatgtcacagatcagctgatccacagggtatttaaaccagtcgagcccgtcaagaggc

SEQ ID NO: 58 - DNA, 500 bp, Adenovirus D26
  MISC_FEATURE (1)..(500): 500bp 5 UTR
catcatcaataatataccccacaaagtaaacaaaagttaatatgcaaatgaggttttaaatttagggcggggctactgctgattggacgagaaacggtgatgcaaatgacgtcacgacgcacggctaacggtcgccgcggaggcgtggcctagcccggaagcaagtcgcggggctgatgacgtataaaaaagcggactttagacccggaaacggccgattttcccgcggccacgcccggatatgaggtaattctgggcggatgcaagtgaaattaggtcattttggcgcgaaaactgaatgaggaagtgaaaagcgaaaaataccggtccctcccagggcggaatatttaccgagggccgagagactttgaccgattacgtgggggtttcgattgcggtgtttttttcgcgaatttccgcgtccgtgtcaaagtccggtgtttatgtcacagatcagctgatccgcagggtatttaaaccagtcgagtccgtcaagaggc

SEQ ID NO: 59 - DNA, 500 bp, Adenovirus D27
  MISC_FEATURE (1)..(500): 500bp 5 UTR
catcatcaataatataccccacaaagtaaacaaaagttaatatgcaaatgagcttttgaattttaacggtttcggggcggagccaacgctgattggacgagagaagacgatgcaaatgacgtcacgacgcacggcgttaacggtcgccgcggaggcgtggcctagcccggaagcaagtcgcggggctgatgacgtataaaaaagcggactttagacccggaaacggccgattttcccgcggccacgcccggatatgaggtaattctgggcggatgcaagtgaaattaggtcattttggcgcgaaaactgaatgaggaagtgaaaagcgaaaaataccggtccctcccagggcggaatatttaccgagggccgagagactttgaccgattacgtgggggtttcgattgcggtgtttttttcgcgaatttccgcgtccgtgtcaaagtccggtgtttatgtcacagatcagctgatccgcagggtatttaaaccagtcgagt

SEQ ID NO: 60 - DNA, 500 bp, Adenovirus D33
  MISC_FEATURE (1)..(500): 500bp 5 UTR
catcatcaataatataccccacaaagtaaacaaaagttaatatgcaaatgaggttttaaatttagggcggggctactgctgattggccgagaaacgttgatgcaaatgacgtcacgacgcacggctaacggtcgccgcggaggcgtggcctagcccggaagcaagtcgcgtggctgatgacgtataaaaagcggactttagacccggaaacggccgattttcccgcggccacgcccggatatgaggtaattctgggcggatgcaagtgaaattaggtcattttggcgcgaaaactgaatgaggaagtgaaaagcgaaaaataccggtcccgcccagggcggaatatttaccgagggccgagagactttgaccgattacgtgggggtttcgattgcggtgtttttttcgcgaatttccgcgtccgtgtcaaagtccggtgtttatgtcacagatcagctgatccacagggtatttaaaccagtcgagcccgtcaagaggcc

SEQ ID NO: 61 - DNA, 500 bp, Adenovirus D37
  MISC_FEATURE (1)..(500): 500bp 5 UTR
atcatcaataatataccccacaaagtaaacaaaagttaatatgcaaatgagcttttgaattttaacggttttggggcggagccaacgctgattggacgagaagcggtgatgcaaataacgtcacgacgcacggctaacggccggcgcggaggcgtggcctaggccggaagcaagtcgcggggctaatgacgtataaaaaagcggactttagacccggaaacggccgattttcccgcggccacgcccggatatgaggtaattctgggcggatgcaagtgaaattaggtcattttggcgccaaaactgaatgaggaagtgaaaagtgaaaaatacctgtcccgcccagggcggaatatttaccgagggccgagagactttgaccgattacgtggggtttcgattgcggtgtttttttcgcgaatttccgcgtccgtgtgaaagtccggtgtttatgtcacagatcagctgatccacagggtatttaaaccagttgagcccgt

SEQ ID NO: 62 - DNA, 500 bp, Adenovirus D69; identical to SEQ ID NO: 55
  MISC_FEATURE (1)..(500): 500bp 5 UTR

SEQ ID NO: 63 - DNA, 500 bp, Adenovirus E4
  MISC_FEATURE (1)..(500): 500bp 5 UTR
atcatcaataatataccttattttttttgtgtgagttaatatgcaaataaggcgtgaaaatttggggatggggcgcgctgattggctgtgacagcggcgttcgttaggggcggggcaggtgacgttttgatgacgcgactatgaggaggagttagtttgcaagttctggtggggaaaagtgacgtcaaacgaggtgtggtttaaacacggaaatactcaattttcccacgctgtctaacaggaaatgaggtgtttttgggcggatgcaagtgaaaacggaccattttcgcgcgaaaactgaatgaggaagtgaaatctgagtaatttagtgtttatgacagggaggagtatttgccgagggccgagtagactttgaccgtttacgtgggggtttcgattaccgtgtttttcacctaaagttccgcgtacggtgtcaaagtccggtgtttttacgtaggtgtcagctgatcgtcagggtatttaaacctgcgctctgcagt

SEQ ID NO: 64 - DNA, 500 bp, Adenovirus G52
  MISC_FEATURE (1)..(500): 500bp 5 UTR
ctgcaggttaattaaggaagggcgaattctgcagatatccatcacactggcggccgctcgagcatgcatctagagggcccaattcgccctatagtgagtcgtattacaattcactggcccatcatcaataatataccttaaagctggaaacgagccaatatgataatgagcggggaggagcgaggcggggccggggtgacgtgggaatggggagaggggcggggcggggcgaggttcgcaggcgggcgtggggaggcgcttagcttttacgtatgcggaaggaggttttatgccggaagttgggtaatttgggcgtatacttgtaagttttgtgtaaattggcgcgaaaactgggtaatgaggaagttgaggttaatatgtactttttatgactgggcggaatttctgctgatcagcagtgaactttgggcgctgacggggaggtttcgctacgtggcagtaccacgagaaggctcaaaggtcccatttattgtactcct

SEQ ID NO: 65 - DNA, 150 bp, Adenovirus A12
  MISC_FEATURE (1)..(150): 150bp 5 UTR
ctgcaggttaattaaggaagggcgaattctgcagatatccatcacactggcggccgctcgagcatgcatctagagggcccaattcgccctatagtgagtcgtattacaattcactggcccctatctaataatataccttatactggacta

SEQ ID NO: 66 - DNA, 150 bp, Adenovirus A18
  MISC_FEATURE (1)..(150): 150bp 5 UTR
cgatcgcgtttaaacaagggcgaattccagcacactggcggccgttactagtggatccgagctcggtaccaagcttgatgcatagcttgagtattctatagtgtcacctaaatagcttggccctatctaaatatataccttatactggac

SEQ ID NO: 67 - DNA, 150 bp, Adenovirus A31
  MISC_FEATURE (1)..(150): 150bp 5 UTR
cgatcgcgtttaaacaagggcgaattccagcacactggcggccgttactagtggatccgagctcggtaccaagcttgatgcatagcttgagtattctatagtgtcacctaaatagcttggccatcatcaataatataccttacactggac

SEQ ID NO: 68 - DNA, 150 bp, Adenovirus B3
  MISC_FEATURE (1)..(150): 150bp 5 UTR
tttaaacctatctatataatataccttatagatggaatggtgccaacatgtaaatgaggtaatttaaaaaagtgcgcgctgtgtggtgattggctgcggggttaacggctaaaaggggcggcgcgaccgtgggaaaatgacgtgacttat

SEQ ID NO: 69 - DNA, 150 bp, Adenovirus B7
  MISC_FEATURE (1)..(150): 150bp 5 UTR
agaccaaaacgatctcaagcgatcgcgtttaaacaagggcgaattccagcacactggcggccgttactagtggatccgagctcggtaccaagcttgatgcatagcttgagtattctatagtgtcacctaaatagcttggccatcatcaat

SEQ ID NO: 70 - DNA, 150 bp, Adenovirus B16
  MISC_FEATURE (1)..(150): 150bp 5 UTR
cctgcaggcattatcaataatataccttatagatggaatggtgccaacatgtaaatgaggtaatttaaaaaagtgcgcgctgtgtggtgattggctgcggggtgaacggctaaaaggggcgggcaatgctgggatgtgacgtaacttatg

SEQ ID NO: 71 - DNA, 150 bp, Adenovirus B21
  MISC_FEATURE (1)..(150): 150bp 5 UTR
ctgcaggttaattaaggaagggcgaattctgcagatatccatcacactggcggccgctcgagcatgcatctagagggcccaattcgccctatagtgagtcgtattacaattcactggcctattatataatataccttatagatggaatgg

SEQ ID NO: 72 - DNA, 150 bp, Adenovirus B50
  MISC_FEATURE (1)..(150): 150bp 5 UTR
ctgcaggttaattaaggaagggcgaattctgcagatatccatcacactggcggccgctcgagcatgcatctagagggcccaattcgccctatagtgagtcgtattacaattcactggcccaatcaatataatataccttatagatggaat

SEQ ID NO: 73 - DNA, 150 bp, Adenovirus B11
  MISC_FEATURE (1)..(150): 150bp 5 UTR
cgatcgcgtttaaacaagggcgaattccagcacactggcggccgttactagtggatccgagctcggtaccaagcttgatgcatagcttgagtattctatagtgtcacctaaatagcttggccatcatcaataatataccttatagatgga

SEQ ID NO: 74 - DNA, 150 bp, Adenovirus B14a
  MISC_FEATURE (1)..(150): 150bp 5 UTR
ctgcaggttaattaaggaagggcgaattctgcagatatccatcacactggcggccgctcgagcatgcatctagagggcccaattcgccctatagtgagtcgtattacaattcactggcccatcatcaataatataccttatagatggaat

SEQ ID NO: 75 - DNA, 150 bp, Adenovirus B14b; identical to SEQ ID NO: 74
  MISC_FEATURE (1)..(150): 150bp 5 UTR

SEQ ID NO: 76 - DNA, 150 bp, Adenovirus B34
  MISC_FEATURE (1)..(150): 150bp 5 UTR
aattgctgatttgcgcgcgaaaactgaatgaggaagtgtttttctgaataatgtggtatttatggcagggtggagtatttgttcagggccaggtagactttgacccattacgtggaggtttcgattaccgtgttttttacctgaatttcc

SEQ ID NO: 77 - DNA, 150 bp, Adenovirus B35
  MISC_FEATURE (1)..(150): 150bp 5 UTR
cgatcgcgtttaaacaagggcgaattccagcacactggcggccgctcgagcatgcatctagagggcccaattcgccctatagtgagtcgtattacaatgcactggcccatcatcaataatataccttatagatggaatggtgccaatatg

SEQ ID NO: 78 - DNA, 150 bp, Adenovirus C1
  MISC_FEATURE (1)..(150): 150bp 5 UTR
ttaattaacatcatcaataatataccttattttggattgaagccaatatgataatgagggggtggagtttgtgacgtggcgcggggcgtgggaacggggcgggtgacgtagtagtgtggcggaagtgtgatgttgcaagtgtggcggaac

SEQ ID NO: 79 - DNA, 150 bp, Adenovirus C2
  MISC_FEATURE (1)..(150): 150bp 5 UTR
tttaaatcatcatcaataatataccttattttggattgaagccaatatgataatgagggggtggagtttgtgacgtggcgcggggcgtgggaacggggcgggtgacgtagtagtgtggcggaagtgtgatgttgcaagtgtggcggaaca

SEQ ID NO: 80 - DNA, 150 bp, Adenovirus C5; identical to SEQ ID NO: 78
  MISC_FEATURE (1)..(150): 150bp 5 UTR

SEQ ID NO: 81 - DNA, 150 bp, Adenovirus C6
  MISC_FEATURE (1)..(150): 150bp 5 UTR
ttttaaatcatcatcaataatataccttattttggattgaagccaatatgataatgagggggtggagtttgtgacgtggcgcggggcgtgggaacggggcgggtgacgtagtagtgtggcggaagtgtgatgttgtaagtgtggcggaac

SEQ ID NO: 82 - DNA, 150 bp, Adenovirus D8
  MISC_FEATURE (1)..(150): 150bp 5 UTR
cgatcgcgtttaaacaagggcgaattccagcacactggcggccgttactagtggatccgagctcggtaccaagcttgatgcatagcttgagtattctatagtgtcacctaaatagcttggcctatctatataatataccccacaaagtaa

SEQ ID NO: 83 - DNA, 150 bp, Adenovirus D9
  MISC_FEATURE (1)..(150): 150bp 5 UTR
ctgcaggttaattaaggaagggcgaattctgcagatatccatcacactggcggccgctcgagcatgcatctagagggcccaattcgccctatagtgagtcgtattacaattcactggccccatctatataatataccccacaaagtaaac

SEQ ID NO: 84 - DNA, 150 bp, Adenovirus D10
  MISC_FEATURE (1)..(150): 150bp 5 UTR
catcatcaataatataccccacaaagtaaacaaaagttaatatgcaaatgaggttttaaatttagggcggggctactgctgattggccgagaaacgttgatgcaaatgacgtcacgacgcacggcgttaacggtcgccgcggaggcgtgg

SEQ ID NO: 85 - DNA, 150 bp, Adenovirus D13
  MISC_FEATURE (1)..(150): 150bp 5 UTR
catcatcaataatataccccacaaagtaaacaaaagttaatatgcaaatgaggttttaaatttagggcggggctactgctgattggccgagaaacgttgatgcaaatgacgtcacgacgcacggctaacggtcgccgcggaggcgtggcc

SEQ ID NO: 86 - DNA, 150 bp, Adenovirus D17; identical to SEQ ID NO: 85
  MISC_FEATURE (1)..(150): 150bp 5 UTR

SEQ ID NO: 87 - DNA, 150 bp, Adenovirus D20
  MISC_FEATURE (1)..(150): 150bp 5 UTR
catcatcaataatataccccacaaagtaaacaaaagttaatatgtaaatgagcttttgaatttagggcggggccgacgctgattggccgttgcaagaaccgttagtgacgtcacgacgcacggccgacggccgccgcggaggcgtggcct

SEQ ID NO: 88 - DNA, 150 bp, Adenovirus D24
  MISC_FEATURE (1)..(150): 150bp 5 UTR
catcatcaataatataccccacaaagtaaacaaaagttaacatgcaaatgagcttttgaatttagggcggggccagcgctgattggacgagagaagatgatgcaaatgacgtcacgacgcacggctaacggtcgccgcggaggcgtggcc

SEQ ID NO: 89 - DNA, 150 bp, Adenovirus D25; identical to SEQ ID NO: 85
  MISC_FEATURE (1)..(150): 150bp 5 UTR

SEQ ID NO: 90 - DNA, 150 bp, Adenovirus D26
  MISC_FEATURE (1)..(150): 150bp 5 UTR
catcatcaataatataccccacaaagtaaacaaaagttaatatgcaaatgaggttttaaatttagggcggggctactgctgattggacgagaaacggtgatgcaaatgacgtcacgacgcacggctaacggtcgccgcggaggcgtggcc

SEQ ID NO: 91 - DNA, 150 bp, Adenovirus D27
  MISC_FEATURE (1)..(150): 150bp 5 UTR
catcatcaataatataccccacaaagtaaacaaaagttaatatgcaaatgagcttttgaattttaacggtttcggggcggagccaacgctgattggacgagagaagacgatgcaaatgacgtcacgacgcacggcgttaacggtcgccgc

SEQ ID NO: 92 - DNA, 150 bp, Adenovirus D33; identical to SEQ ID NO: 85
  MISC_FEATURE (1)..(150): 150bp 5 UTR

SEQ ID NO: 93 - DNA, 150 bp, Adenovirus D37
  MISC_FEATURE (1)..(150): 150bp 5 UTR
atcatcaataatataccccacaaagtaaacaaaagttaatatgcaaatgagcttttgaattttaacggttttggggcggagccaacgctgattggacgagaagcggtgatgcaaataacgtcacgacgcacggctaacggccggcgcgga

SEQ ID NO: 94 - DNA, 150 bp, Adenovirus D69; identical to SEQ ID NO: 87
  MISC_FEATURE (1)..(150): 150bp 5 UTR

SEQ ID NO: 95 - DNA, 150 bp, Adenovirus E4
  MISC_FEATURE (1)..(150): 150bp 5 UTR
atcatcaataatataccttattttttttgtgtgagttaatatgcaaataaggcgtgaaaatttggggatggggcgcgctgattggctgtgacagcggcgttcgttaggggcggggcaggtgacgttttgatgacgcgactatgaggagga

SEQ ID NO: 96 - DNA, 150 bp, Adenovirus G52
  MISC_FEATURE (1)..(150): 150bp 5 UTR
ctgcaggttaattaaggaagggcgaattctgcagatatccatcacactggcggccgctcgagcatgcatctagagggcccaattcgccctatagtgagtcgtattacaattcactggcccatcatcaataatataccttaaagctggaaa

SEQ ID NO: 97 - DNA, 150 bp, Adenovirus A12
  MISC_FEATURE (1)..(150): 150bp 3 ITR
gtccagtataaggtatattattagatagggccaagctatttaggtgacactatagaatactcaagctatgcatcaagcttggtaccgagctcggatccactagtaacggccgccagtgtgctggaattcgcccttgtttaaacgcgatcg

SEQ ID NO: 98 - DNA, 150 bp, Adenovirus A18
  MISC_FEATURE (1)..(150): 150bp 3 ITR
tagtccagtataaggtatatatttagataggggccagtgaattgtaatacgactcactatagggcgaattgggccctctagatgcatgctcgagcggccgccagtgtgatggatatctgcagaattcgcccttccttaattaacctgcag

SEQ ID NO: 99 - DNA, 150 bp, Adenovirus A31
  MISC_FEATURE (1)..(150): 150bp 3 ITR
aagtccagtgtaaggtatattattgatgatgggccagtgaattgtaatacgactcactatagggcgaattgggccctctagatgcatgctcgagcggccgccagtgtgatggatatctgcagaattcgcccttccttaattaacctgcag

SEQ ID NO: 100 - DNA, 150 bp, Adenovirus B3
  MISC_FEATURE (1)..(150): 150bp 3 ITR
acttgcaacgtcattttcccacggtcgcgccgccccttttagccgttaaccccgcagccaatcaccacacagcgcgcacttttttaaattacctcatttacatgttggcaccattccatctataaggtatattatatagatagcctgcag

SEQ ID NO: 101 - DNA, 150 bp, Adenovirus B7
  MISC_FEATURE (1)..(150): 150bp 3 ITR
attccatctataaggtatattattgatgatgggccagtgaattgtaatacgactcactatagggcgaattgggccctctagatgcatgctcgagcggccgccagtgtgatggatatctgcagaattcgcccttccttaattaacctgcag

SEQ ID NO: 102 - DNA, 150 bp, Adenovirus B16
  MISC_FEATURE (1)..(150): 150bp 3 ITR
cttgcaacgtcattttcccacggccgcaccgccccttttagccgttcaccccgcagccaatcaccacacagcgcgcacttttttaaattacctcatttacatgttggcaccattccatctataaggtatattatagataatggcgatcgc

SEQ ID NO: 103 - DNA, 150 bp, Adenovirus B21
  MISC_FEATURE (1)..(150): 150bp 3 ITR
aaccccgcagccaatcaccacacagcgcgcacttttttaaattacctcatttgcatattggcaccattccatctataaggtatattatataatagccaagctatttaggtgacactatagaatactcaagctatgcactgagagatcccc

SEQ ID NO: 104 - DNA, 150 bp, Adenovirus B50
  MISC_FEATURE (1)..(150): 150bp 3 ITR
tccatcgataaggtatatcatattgattggccaagctatttaggtgacactatagaatactcaagctatgcatcaagcttggtaccgagctcggatccactagtaacggccgccagtgtgctggaattcgcccttgtttaaacgcgatcg

SEQ ID NO: 105 - DNA, 150 bp, Adenovirus B11; identical to SEQ ID NO: 101
  MISC_FEATURE (1)..(150): 150bp 3 ITR

SEQ ID NO: 106 - DNA, 150 bp, Adenovirus B14a
  MISC_FEATURE (1)..(150): 150bp 3 ITR
tccatctataaggtatattattgatgatggccaagctatttaggtgacactatagaatactcaagctatgcatcaagcttggtaccgagctcggatccactagtaacggccgccagtgtgctggaattcgcccttgtttaaacgcgatcg

SEQ ID NO: 107 - DNA, 150 bp, Adenovirus B14b
  MISC_FEATURE (1)..(150): 150bp 3 ITR
gtaatgggtcaaagtctacctggccctgaacaaatactccaccctgccataaataccgcattattcagaaaaccacttcctcattcagttttcgcgcgaaaatgaacaatttttacttgcatccggccaaaactacctcatttcctgtta

SEQ ID NO: 108 - DNA, 150 bp, Adenovirus B34; identical to SEQ ID NO: 106
  MISC_FEATURE (1)..(150): 150bp 3' ITR

SEQ ID NO: 109 - DNA, 150 bp, Adenovirus B35; identical to SEQ ID NO: 101
  MISC_FEATURE (1)..(150): 150bp 3' ITR

SEQ ID NO: 110 - DNA, 150 bp, Adenovirus C1
  MISC_FEATURE (1)..(150): 150bp 3' ITR
ctacaattcccaatacatgcaagttactccgccctaaaacctacgtcacccgccccgttcccacgccccgcgccacgtcacaaactccaccccctcattatcatattggcttcaatccaaaataaggtatattattgatgatgatttaaa

SEQ ID NO: 111 - DNA, 150 bp, Adenovirus C2
  MISC_FEATURE (1)..(150): 150bp 3' ITR
tacaattcccaatacatgcaagttactccgccctaaaacctacgtcacccgccccgttcccacgccccgcgccacgtcacaaactccaccccctcattatcatattggcttcaatccaaaataaggtatattattgatgatgttaattaa

SEQ ID NO: 112 - DNA, 150 bp, Adenovirus C5
  MISC_FEATURE (1)..(150): 150bp 3' ITR
ctacaattcccaacacatacaagttactccgccctaaaacctacgtcacccgccccgttcccacgccccgcgccacgtcacaaactccaccccctcattatcatattggcttcaatccaaaataaggtatattattgatgatgatttaaa

SEQ ID NO: 113 - DNA, 150 bp, Adenovirus C6; identical to SEQ ID NO: 111
  MISC_FEATURE (1)..(150): 150bp 3' ITR

SEQ ID NO: 114 - DNA, 150 bp, Adenovirus D8
  MISC_FEATURE (1)..(150): 150bp 3' ITR
ttgtttactttgtggggtggatttataggtgggccagtgaattgtaatacgactcactatagggcgaattgggccctctagatgcatgctcgagcggccgccagtgtgatggatatctgcagaattcgcccttccttaattaacctgcag

SEQ ID NO: 115 - DNA, 150 bp, Adenovirus D9
  MISC_FEATURE (1)..(150): 150bp 3' ITR
ttactttgtggggtatattatatagataggccaagctatttaggtgacactatagaatactcaagctatgcatcaagcttggtaccgagctcggatccactagtaacggccgccagtgtgctggaattcgcccttgtttaaacgcgatcg

SEQ ID NO: 116 - DNA, 150 bp, Adenovirus D10
  MISC_FEATURE (1)..(150): 150bp 3' ITR
ccacgcctccgcggcgaccgttaacgccgtgcgtcgtgacgtcatttgcatcaacgtttctcggccaatcagcagtagccccgccctaaatttaaaacctcatttgcatattaacttttgtttactttgtggggtatattattgatgatg

SEQ ID NO: 117 - DNA, 150 bp, Adenovirus D13
  MISC_FEATURE (1)..(150): 150bp 3' ITR
ccgcgacgaccgtcggccgtgcgtcgtgacgtcatttgcatcaccgcttctcgttcaatgagcgttggctccgcccaaaaaccgttaagattcaaaagctcatttgcatattaacttttgtttactttgtggggtatattattgatgatg

SEQ ID NO: 118 - DNA, 150 bp, Adenovirus D17
  MISC_FEATURE (1)..(150): 150bp 3' ITR
ggccacgcctccgcggcgaccgttagccgtgcgtcgtgacgtcatttgcatcaacgtttctcggccaatcagcagtagccccgccctaaatttaaaacctcatttgcatattaacttttgtttactttgtggggtatattattgatgatg

SEQ ID NO: 119 - DNA, 150 bp, Adenovirus D20
  MISC_FEATURE (1)..(150): 150bp 3' ITR
cagccacgcctccgcggcggccgtcggccgtgcgtcgtgacgtcactaacggttcttgcaacggccaatcagcgtcggccccgccctaaattcaaaagctcatttacatattaacttttgtttactttgtggggtatattattgatgatg

SEQ ID NO: 120 - DNA, 150 bp, Adenovirus D24; identical to SEQ ID NO: 118
  MISC_FEATURE (1)..(150): 150bp 3' ITR

SEQ ID NO: 121 - DNA, 150 bp, Adenovirus D25
  MISC_FEATURE (1)..(150): 150bp 3' ITR
ggccacgcctccgcggcgaccgttagccgtgcgtcgtgacgtcatttgcatcaccgtttctcgaccaatcagcgacgaccccaccctaaattcaaaagctcatttgcatattaacttttgtttactttgtggggtatattattgatgatg

SEQ ID NO: 122 - DNA, 150 bp, Adenovirus D26; identical to SEQ ID NO: 118
  MISC_FEATURE (1)..(150): 150bp 3' ITR

SEQ ID NO: 123 - DNA, 150 bp, Adenovirus D27; identical to SEQ ID NO: 118
  MISC_FEATURE (1)..(150): 150bp 3' ITR

SEQ ID NO: 124 - DNA, 150 bp, Adenovirus D33
  MISC_FEATURE (1)..(150): 150bp 3' ITR
ccgcggcgaccgtcagccgtgcgtcgtgacgtcatttgcatcaccgcttctcggccaatcagcattggctccgccccaaaaccgttaaaattcaaaagctcatttgcatattaacttttgtttactttgtggggtatattattgatgatg

SEQ ID NO: 125 - DNA, 150 bp, Adenovirus D37
  MISC_FEATURE (1)..(150): 150bp 3' ITR
cgcgccggccgttagccgtgcgtcgtgacgttatttgcatcaccgcttctcgtccaatcagcgttggctccgccccaaaaccgttaaaattcaaaagctcatttgcatattaacttttgtttactttgtggggtatattattgatgatgc

SEQ ID NO: 126 - DNA, 150 bp, Adenovirus D69
  MISC_FEATURE (1)..(150): 150bp 3' ITR
agccacgcctccgcggcgaccgttagccgtgcgtcgtgacgtcatttgcatcaacgtttctcggccaatcagcagtagccccgccctaaatttaaaacctcatttgcatattaacttttgtttactttgtggggtatattattgatgatg

SEQ ID NO: 127 - DNA, 150 bp, Adenovirus E4
  MISC_FEATURE (1)..(150): 150bp 3' ITR
tcaaattccgtcgaccgttaaacacatcagttaccccgcccctaacgaacgccgctgtcacagccaatcagcgcgccccatccccaaattttcacgccttatttgcatattaactcacacaaaaaaaataaggtatattattgatgatgc

SEQ ID NO: 128 - DNA, 150 bp, Adenovirus G52
  MISC_FEATURE (1)..(150): 150bp 3' ITR
ttccagaataaggtatattattgatgatggccaagctatttaggtgacactatagaatactcaagctatgcatcaagcttggtaccgagctcggatccactagtaacggccgccagtgtgctggaattcgcccttgtttaaacgcgatcg

SEQ ID NO: 129 - DNA, 1764 bp, Adenovirus A12
  MISC_FEATURE (1)..(1764): Fiber Gene
atgaagcgcagcagaacccagtatgctgaagaaacagaagaaaatgatgacttcaaccccgtttacccttttgacccatttgacacatcagacgtaccctttgttacacccccttttacttcttccaatggtcttcaagaaaaaccaccaggtgtattagcacttaattacaaagaccccattgtaactgaaaatggaacccttacactcaagctaggggacggaataaaacttaatgcccaaggtcaacttacagctagtaataatatcaatgttttggagccccttaccaacacctcacaaggtcttaaactttcttggagcgcccccctagcagtaaaggctagtgccctcacacttaacacaagagcgcccttaaccacaacggatgaaagcttagccttaataaccgcccctcccattacagtagagtcttcgcgtttgggcttggccaccatagcccctctaagcttagatggaggtggaaacctaggtttaaatctttctgctcccctggacgttagtaacaacaatttgcatctcaccactgaaactcccttagttgtaaattctagcggtgccctatctgttgctactgcagaccccataagtgttcgcaacaacgctcttaccctacctacggcagatccgttaatggtgagctccgatgggttgggaataagtgtcactagtcccattacagtaataaacggttccttagccttgtctacaactgctcccctcaacagcacaggatccactttaagtctgtctgttgccaatcctctgactatttcacaagacacattgactgtttccactggtaacggtcttcaagtgtcggggtctcaattagtaacaagaataggggatggtttaacattcgataatggggtcatgaaagtaaacgttgccgggggaatgagaacttctggcggtagaataattttagatgttaattatccctttgatgcgagcaataacctgtccttaagacggggattgggactaatttataaccaatctacaaactggaacttaacaactgatattagtaccgaaaaaggtttaatgtttagtggcaatcaaatagctcttaatgcaggtcaggggcttacatttaataatggccaacttagggttaagttgggagctggacttatttttgattcaaacaataacattgccttaggcagcagcagcaacactccatacgaccctctgacactgtggacaactcctgacccaccaccaaactgcagcctcatacaagagctagatgcaaaactcaccctgtgcttaacaaaaaacggatctattgttaatggcattgtaagtttagtgggtgttaagggtaatctcctaaatatccaaagtactactaccactgtaggagtgcatttagtgtttgatgaacagggaagattaatcacatcaacccctactgccctggttccccaagcttcgtggggatatagacaaggccaatcagtgtctaccaatactgttaccaatggtctaggttttatgcctaatgtgagtgcttaccctagaccaaatgccagtgaggctaaaagccaaatggtaagtctcacgtacttacagggagatacatctaaacctataacaatgaaagttgcatttaatggcattacgtcgctaaatggatactctttaacattcatgtggtcaggtctatcaaactatataaatcagcctttctctacaccatcctgctccttttcttacattacccaagaataa

SEQ ID NO: 130 - DNA, 1761 bp, Adenovirus A18
  MISC_FEATURE (1)..(1761): Fiber Gene
atgaagcgcagcagagtccagtatgctgaagaaactgaagaaaatgatgacttcaaccccgtttacccttttaacccctctgatacaacaattgtgccatttattacgcccccttttaccacttccaatggccttcaagaaaaaccaccaggagtactagcgttgagctacaaagatcccattgttaccgaaaatggaacccttacacttaaattaggggatggaataaaacttaatgcacagggtcaacttacagctagtaacactgctaaggtactagagccccttaccaacaccacacaaggcattaaactttcttggagcgcccccctcgcagtacgggcaagtgcccttacattaattacaaaagcgcctttggttacagcggatgaaagcttaagcttagtaacaacgcctcccattacagtagagtcttctcgtctgggattggctaccatagcccctcttagtttagatggaggtggaaatttaggtttggatttatctgctcccctggacgttagtaacaacaatttgcatctcaccactgaagcccccttagttataaactctggcggtgccctaactgttgctactacggaaccccttggtgttcgtaacaacactctcaccttatctactatggaacccttaacagtaagcgctaatgggttaggaataaacgttaccagtccaatttcggtggccaatggttccttagccttggccgccgctgctcctcttaacaccacaggatccaccttaggtctttctgttacaaatcctctcactatttcaggaaatgcgctcactgtagccactggcaatggtcttcaagtatcggggtctcaattagtagcaagaataggtgatggtttaaggtttgataatggaattataaaggtatatgccgccgggggaatgagaacttcagatggtaaaataattctagatgtcgactacccatttaatgcaaccaccaacttgtctttaagaagaggtttggggctaatttataatcagtctacaaattggaacttaacaactgatattaacactcaaaagggtttaatgttcattggaaatcagatagctattaatgccggacagggacttacatttaataatcaacaactacaggtaaaattgggagctggacttacttttgactcaaacaataacattgtcctagacaatagcagcggcactgcctacgaccctcttacactgtggacaactcccgaccctcttccaaattgcagtcttcttgaagacttagatacaaagctaacattgtgtttaagtaaaaatggcgccattgtacatggcgtggtaagctttgtgcccgttaaaggtgcgctactaaatttacaaaaccctaccagcattggacttcacattctatttgaccaacatggtgtcttacaaacaggaacaccatcagccatagccccacaggcgtactggggatatagacagggacaatccatatcccctactcctgttaccaacgctctgaaatttatgcctaactccagtgcataccccagagctaacggaagtgaaccaaaaagtcaaacgtttacttctacatatatgcaaggcgacatcgctaaacccatgacaatgaaagtctcgtttaatgccgcttctactgttactggctactctttaagctttacatggacaggtatctcaaactaccgtaatcaagctttttcatgcccatcatgttcattttcttacctagcccaagaataa

SEQ ID NO: 131 - DNA, 1668 bp, Adenovirus A31
  MISC_FEATURE (1)..(1668): Fiber Gene
atgaagcgcagcagaacccagtacgctgaagaacctgaagaaaatgacgacttcaaccccgtttacccttttgacccatatgacacagcgcatgtgccctttgttacacccccttttacttcttccaatgcttttcaagaaaaaccacccggtgtattatcacttaattacaaagatcccattgttactgaaaatggatcccttaccctaaagttagggaacggaataaagcttaattcacaaggtcaacttacaaccactaacactaaagtactagaaccccttgcccacacctcacagggtcttacactttcttggagcgccccattatcagttaaggccagtgcccttacacttaatacaatggcaccattcacaacaacaaacgaaagcttaagcttggtcactgcccctcccattacagtggaagcttcacaattgggcttagccactgtagcacctctaagcttagacggagggggaaaccttggtttggatcttctcgctcccttagttgtaaattctagcaacgcgctaaccctatctgcttcagatccgttaactgtaaattccaatagtttaggattaaatattaccagtcccattacactaataaacggatccttggctttagccacatcccctcctctggacaccacaggatctactttaaatctttctgttgctgctcctctcagtgtttcacagaacgcactcactgtttcaaccggtaacggtcttcaagtatcaggatctcaattagtaacaagaataggagatggtttacgatttgataatggggttataaaagcatatgttgccgggggaatgagactctcagggggtaaaataattttagatgttaattatccctttgatgcaaccaccaacctttcattgaggagaggatcgggcctcatatataatgagtctacaaactggaacttaacaactgatatcagcaccgaaaaaggcctaacgtttagtgggaaccaaatagctatcaacgcaggtccaggtctcacgtttaataaccgcaagcttcaggtaaaattgggcgcgggactcactttcgattcaaatgataatattgccttaaatagtattgctactccgtatgatcctttaacgttgtggacaactccggatcctccgcccaactgcactctcagacaagaacttgatgcaaaactaactttgtgtttaacaaagaacgaatctattgtgaatggcatagttagtttgataggtgttaagggggatctcttacatattcaacctaccaccaccactgtgggactgcatttagtgtttgatcgacagggacgattagtcacaacaacgcccactgccttagttccccaggcttcctggggatataaacaaggtcaatcggtatctagcagcgctgttgctaatgctttaggattcatgcctaatgtaagtgcttaccctagaccaaacgcgggtgaagccaaaagtcaaatgttaagtcagacatatttacagggagatacaactaaacctattacaatgaaagttgtatttaatggcaatgcaacagtggatggatactctctaacatttatctggacaggtgtgtcaaactatctaaaccaacagttttcaacaccatcttgttcattttcgtatattgcccaagaataa

SEQ ID NO: 132 - DNA, 960 bp, Adenovirus B3
  MISC_FEATURE (1)..(960): Fiber Gene
atggccaagcgagctcggctaagcacttccttcaacccggtgtacccttatgaagatgaaagcagctcacaacacccatttataaatcctggtttcatttcccctgacgggttcacacaaagtccaaacggggttttaagtcttaaatgtgttaatccacttaccactgcaagcggctccctccaacttaaagtgggaagtggtcttacagtagacactactgatggatccttagaagaaaacatcaaagttaacacccccctaacaaagtcaaaccattctataaatttaccaataggaaacggtttgcaaatagaacaaaacaaactttgcagtaaactcggaaatggtcttacatttgactcttccaattctattgcactgaaaaataacactttatggacaggtccaaaaccagaagccaactgcataattgaatacgggaaacaaaacccagatagcaaactaactttaatccttgtaaaaaatggaggaattgttaatggatatgtaacgctaatgggagcctcagactacgttaacaccttatttaaaaacaaaaatgtctccattaatgtagaactatactttgatgccactggtcatatattaccagactcatcttctcttaaaacagatctagaactaaaatacaagcaaaccgctgactttagtgcaagaggttttatgccaagtactacagcgtatccatttgtccttcctaatgcgggaacacataatgaaaattatatttttggtcaatgctactacaaagcaagcgatggtgccctttttccgttggaagttactgttatgcttaataaacgcctgccagatagtcgcacatcctatgttatgacttttttatggtccttgaatgctggtctagctccagaaactactcaggcaaccctcataacctccccatttaccttttcctatattagagaagatgactga

SEQ ID NO: 133 - DNA, 978 bp, Adenovirus B7
  MISC_FEATURE (1)..(978): Fiber Gene
atgaccaagagagtccggctcagtgattccttcaaccctgtctacccctatgaagatgaaagcacctcccaacacccctttataaacccagggtttatttccccaaatggctttacacaaagcccagacggagttcttactttaaaatgtttaaccccactaacaaccacaggcgggtctctacagttaaaagtgggagggggtcttacaatagatgacaccgacggttttttgaaagaaaacataagtgccgccacaccactcgttaagactggtcactctataggtttgtcgctaggacccggattaggaacaaatgaaaacaaactttgtgccaaattgggagaaggacttacattcaattccaacaacatttgcattgatgacaatattaacaccctatggacaggagttaaccccaccacagccaactgtcaaataatggcctccagtgaatctaatgattgcaaattaattctaacactagttaaaactggagcccttgtcactgcatttgtttatgttataggagtatctaacgattttaatatgctaactacacataaaaatataaatttcactgcagagctgttttttgattctactggtaatttactaactagcctttcatccctaaaaactccacttaatcataaatcagggcaaaacatggctactggtgcccttactaatgctaaaggtttcatgcccagcacaactgcctatcctttcaatgttaattccagagaaaaagaaaactacatttacggaacttgttactacacagctagtgatcacactgcttttcccattgacatatctgtcatgcttaaccaaagagcattaaataatgagacatcatattgtattcgtgtaacttggtcctggaacacaggagttgccccagaagtgcaaacctctgctactaccctagtcacctctccatttaccttttactacattagagaagacgactga

SEQ ID NO: 134 - DNA, 1062 bp, Adenovirus B16
  MISC_FEATURE (1)..(1062): Fiber Gene
atggccaaacgagctcggctaagcagctccttcaatccggtctacccctatgaagatgaaagcagctcacaacacccctttataaaccctggtttcatttcctcaaatggttttgcacaaagcccagatggagttctaactcttaaatgtgttaatccactcactaccgccagcggacccctccaacttaaagttggaagcagtcttacagtagatactatcgatgggtctttggaggaaaatataactgccgcagcgccactcactaaaactaaccactccataggtttattaataggatctggcttgcaaacaaaggatgataaactttgtttatcgctgggagatgggttggtaacaaaggatgataaactatgtttatcgctgggagatgggttaataacaaaaaatgatgtactatgtgccaaactaggacatggccttgtgtttgactcttccaatgctatcaccatagaaaacaacaccttgtggacaggcgcaaaaccaagcgccaactgtgtaattaaagagggagaagattccccagactgtaagctcactttagttctagtgaagaatggaggactgataaatggatacataacattaatgggagcctcagaatatactaacaccttgtttaaaaacaatcaagttacaatcgatgtaaacctcgcatttgataatactggccaaattattacttacctatcatcccttaaaagtaacctgaactttaaagacaaccaaaacatggctactggaaccataaccagtgccaaaggcttcatgcccagcaccaccgcctatccatttataacatacgccactgagaccctaaatgaagattacatttatggagagtgttactacaaatctaccaatggaactctctttccactaaaagttactgtcacactaaacagacgtatgttagcttctggaatggcctatgctatgaatttttcatggtctctaaatgcagaggaagccccggaaactaccgaagtcactctcattacctcccccttctttttttcttatatcagagaagatgactga

SEQ ID NO: 135 - DNA, 972 bp, Adenovirus B21
  MISC_FEATURE (1)..(972): Fiber Gene
atgaccaagagagtccggctcagtgattccttcaaccctgtctacccctatgaagatgaaagcacctcccaacacccctttataaacccagggtttatttccccaaatggctttacacaaagcccagacggagttcttactttaaattgtttaaccccactaacaaccacaggcgggcctttacagttaaaagtgggagggggacttatagtggatgacactgatgggaccttacaagaaaacatacgtgctacagcacccattactaaaaataatcattctgtagaactatccattggaaatggattagaaacacaaaacaataaactatgtgccaaattgggaaatgggttaaaatttaacaacggtgacatttgtataaaggatagtattaacaccttatggactggaataaagcctccacctaactgtcaaattgtggaaaacactgatacaaacgatggcaaacttactttagtattagtaaaaaacggagggcttgttaatggctacgtatctctagttggtgtatcagacactgtgaaccaaatgttcacacaaaagtcagcaaccatacaattaagattatatttcgactcttctggaaatctattaactgatgaatcaaacttaaaaattccacttaaaaataaatcttctacagcaaccagtgaagctgcaaccagcagcaaagcctttatgccaagtactacagcttatccctttaacaccactactagggatagtgaaaactatattcatggaatatgttactatatgactagttatgatagaagtctagttcccttaaacatttctataatgctaaacagccgtacgatttcttccaatgttgcctatgccatacaatttgaatggaatctaaatgcaaaagaatctccagaaagcaacatagctacgctgaccacatccccctttttcttttcttatattagagaagacgacaactaa

SEQ ID NO: 136 - DNA, 972 bp, Adenovirus B50
  MISC_FEATURE (1)..(972): Fiber Gene
atgaccaagagagtccggctcagtgattccttcaaccctgtctacccctatgaagacgaaagcacctcccaacacccctttataaacccagggtttatttccccaaatggctttacacaaagcccagacggagttcttactttaaattgtttaaccccactaacaaccacaggcgggcctttacagttaaaagtgggagggggacttatagtggatgacactgatgggaccttacaagaaaacatacgtgttacagcacccattactaaaaataatcattctgtagaactatccattggaaatggattagaaacacaaaacaataaactatgtgccaaattgggaaatgggttaaaatttaacaacggtgacatttgtataaaggatagtattaacaccttatggactggaataaagcctccacctaactgtcaaatagtggaaaacactgatacaaacgatggcaaacttactttagtattagtaaaaaacggaggacttgttaatggctacgtatctctagttggtgtatcagacactgtgaaccaaatgttcacacaaaagtcagcaaccatacaattaagattatatttcgactcttctggaaatctattaactgatgaatcaaacttaaaaattccacttaaaaataaatcttctacagcaaccagtgaagctgcaaccagcagcaaagcctttatgccaagtactacagcttatccctttaacaccactactagggatagtgaaaactatattcatggaatatgttactatatgactagttatgatagaagtctagttcccttaaacatttctataatgctaaacagccgtacgatttcttccaatgttgcctatgccatacaatttgaatggaatctaaatgcaaaagaatctccagaaagcaacatagctacgctgaccacatccccctttttcttttcttatattagagaagacgacaactaa

SEQ ID NO: 137 - DNA, 978 bp, Adenovirus B11
  MISC_FEATURE (1)..(978): Fiber Gene
atgaccaagagagtccggctcagtgactccttcaaccctgtctacccctatgaagatgaaagcacctcccaacacccctttataaacccagggtttatttccccaaatggcttcacacaaagcccaaacggagttcttactttaaaatgtttaaccccactaacaaccacaggcggatctctacagctaaaagtgggagggggacttacagtggatgacaccaacggttttttgaaagaaaacataagtgccaccacaccactcgttaagactggtcactctataggtttaccactaggagccggattgggaacgaatgaaaataaactttgtatcaaattaggacaaggacttacattcaattcaaacaacatttgcattgatgacaatattaacaccttatggacaggagtcaaccccaccgaagccaactgtcaaatcatgaactccagtgaatctaatgattgcaaattaattctaacactagttaaaactggagcactagtcactgcatttgtttatgttataggagtatctaacaattttaatatgctaactacacacagaaatataaattttactgcagagctgtttttcgattctactggtaatttactaactagactctcatccctcaaaactccacttaatcataaatcaggacaaaacatggctactggtgccattactaatgctaaaggtttcatgcccagcacgactgcctatcctttcaatgataattctagagaaaaagaaaactacatttacggaacttgttactacacagctagtgatcgcactgcttttcccattgacatatctgtcatgcttaaccgaagagcaataaatgacgagacatcatattgtattcgtataacttggtcctggaacacaggagatgccccagaggtgcaaacctctgctacaaccctagtcacctccccatttaccttttactacatcagagaagacgactga

SEQ ID NO: 138 - DNA, 978 bp, Adenovirus B14a
  MISC_FEATURE (1)..(978): Fiber Gene
atgaccaagagagtccggctcagtgactccttcaaccctgtctacccctatgaagatgaaagcacctcccaacacccctttataaacccagggtttatttccccaaatggcttcacccaaagcccagacggagttcttactttaaaatgtttaaccccgctaacaaccacaggcgggtctctacagctaaaagtgggagggggacttacagtagatgacactgatgggaccttacaagaaaacataggtgccaccacaccacttgttaagactgggcactctataggtttatccctaggagccggattgggaacagatgaaaataaactttgtaccaaattgggagaaggacttacattcaattcaaacaacatttgcattgatgacaatattaacaccctgtggacaggagttaaccccaccgaagccaactgtcaaatgatggactccagtgaatctaatgattgcaaattaattctaacactagttaaaactggagccctagtcactgcatttgtttatgttataggagtatctaacaattttaatatgctaactacatacagaaatataaattttactgcggagctgttttttgattctgcgggtaatttactaactagcctgtcatccctaaaaactccacttaatcataaatcaggacaaaacatggctactggtgccattactaatgctaaaagtttcatgcccagcacaactgcttatcctttcaataataattctagagaaaaagaaaactacatttacggaacttgtcactacacagctagtgatcacactgcttttcccattgacatatctgtcatgcttaaccaaagagcaataagagctgatacatcatattgtattcgtataacttggtcctggaacacaggagatgccccagaggggcaaacctctgctacaaccctagttacctccccatttaccttttactacatcagagaagacgactga

SEQ ID NO: 139 - DNA, 978 bp, Adenovirus B14b; identical to SEQ ID NO: 138
  MISC_FEATURE (1)..(978): Fiber Gene

SEQ ID NO: 140 - DNA, 972 bp, Adenovirus B34
  MISC_FEATURE (1)..(972): Fiber Gene
atgaccaagagagtccggctcagtgactccttcaaccctgtctacccctatgaagatgaaagcacctcccaacacccctttataaacccagggtttatttccccaaatggcttcacacaaagcccagacggagttcttactttaaaatgtttaaccccactaacaaccacaggcggatctctacagctaaaagtgggagggggacttacagtggatgacactgatggtaccttacaagaaaacatacgtgctacagcacccattactaaaaataatcactctgtagaactatccattggaaatggattagaaactcaaaacaataaactatgtgccaaattgggaaatgggttaaaatttaacaacggtgacatttgtataaaggatagtattaacaccttatggactggaataaaccctccacctaactgtcaaattgtggaaaacactaatacaaatgatggcaaacttactttagtattagtaaaaaacggagggcttgttaatggctacgtgtctctagttggtgtatcagacactgtgaaccaaatgttcacacaaaagacagcaaacatccaattaagattatattttgactcttctggaaatctattaactgatgaatcagacttaaaaattccacttaaaaataaatcttctacagcgaccagtgaaactgtagccagcagcaaagcctttatgccaagtactacagcttatcccttcaacaccactactagggatagtgaaaactacattcatggaatatgttactacatgactagttatgatagaagtctatttcccttgaacatttctataatgctaaacagccgtatgatttcttccaatgttgcctatgccatacaatttgaatggaatctaaatgcaagtgaatctccagaaagcaacatagctacgctgaccacatccccctttttcttttcttacattacagaagacgacaactaa

SEQ ID NO: 141 - DNA, 972 bp, Adenovirus B35
  MISC_FEATURE (1)..(972): Fiber Gene
atgaccaagagagtccggctcagtgactccttcaaccctgtctacccctatgaagatgaaagcacctcccaacacccctttataaacccagggtttatttccccaaatggcttcacacaaagcccagacggagttcttactttaaaatgtttaaccccactaacaaccacaggcggatctctacagctaaaagtgggagggggacttacagtggatgacactgatggtaccttacaagaaaacatacgtgctacagcacccattactaaaaataatcactctgtagaactatccattggaaatggattagaaactcaaaacaataaactatgtgccaaattgggaaatgggttaaaatttaacaacggtgacatttgtataaaggatagtattaacaccttatggactggaataaaccctccacctaactgtcaaattgtggaaaacactaatacaaatgatggcaaacttactttagtattagtaaaaaatggagggcttgttaatggctacgtgtctctagttggtgtatcagacactgtgaaccaaatgttcacacaaaagacagcaaacatccaattaagattatattttgactcttctggaaatctattaactgaggaatcagacttaaaaattccacttaaaaataaatcttctacagcgaccagtgaaactgtagccagcagcaaagcctttatgccaagtactacagcttatcccttcaacaccactactagggatagtgaaaactacattcatggaatatgttactacatgactagttatgatagaagtctatttcccttgaacatttctataatgctaaacagccgtatgatttcttccaatgttgcctatgccatacaatttgaatggaatctaaatgcaagtgaatctccagaaagcaacatagctacgctgaccacatccccctttttcttttcttacattacagaagacgacaactaa

SEQ ID NO: 142 - DNA, 1749 bp, Adenovirus C1
  MISC_FEATURE (1)..(1749): Fiber Gene
atgaagcgcgccagaccgtctgaagacaccttcaaccccgtgtacccttatgacacggaaaccggccccccaacagtgcctttccttacccctccctttgtctcccccaatgggttccaagaaagtccccctggggtgctttctctgcgcctttccgaaccactcgtcacctcccacggcatgcttgcgctcaaaatgggcagcggcctagccctggacaaggccggcaaccttacatcacaaaatataaccaccgtcactgagccattaaaaaaaacaaagtccaacataagcctggaaacctccgcgcccctcacagttacatcaggcattcttaccgtagccactgccgcacctttggtggtcgcgggcaacagtcttaccgtgcagtcacaggccccgttaaccgtgcaagactctaaacttagcattgccaccaaaggacccctcacagtgtcagaaggaaagctggccctgcaaacatcgggccccctttctgccactgataacaacacccttactattactacttcaccccctataactactacaaatggtagtttgggtgttaacatggaaaacccactttacaacaacaatggcaaactggggctcagagttgcaggtcctttgcaagtgaccaacgactctcacgcactaacagtaggtacaggtcagggtgttgccattgataataatgcgctacacacaaaagttacaggcgcaatagggtatgatacatctggtaacatggaacttaaaactggagggggagtgcgtgtagacagtgtaaataggcgtcttatactcgatgttgattatccatttgatgcccaaagccaactacgcctaaaactaggacagggacccctatatgtaaactcaagcacacacaacttggatttaaactacaataaaggccttcacttgtttacaactggaaactctaaaaagctagaagtaaatcttaaaacaacaaagggtcttatttttgacaccgatgctgttgcaatacatgcagcacaaggtctagaatttggtaatgatacgtcaacaaatacaaacccacttaaaacaaaactaggattgggattggactatgactcaaacggtggtatgattcccaaacttggaacaggccttagttttgatactacaggggctataacagtgggaaacaaaagcgatgacaaacttaccctgtggacaactcctgacccatcacctaattgtcaaatacactcagaaaaagatgctaagctaacactagttttaactaaatgcggcagtcaggtacttgcaactgtgtcagcactggctgtaaggggcagcctagctcctattagcggaacaataagtagtgctcacattattctcagatttaatgaacatggagtgctaatgaatcattctagtttggatccccaatactggaatttcagaaaaggggatttaacaaacgctacagcatatactaacgcagttggttttatgcccaaccttaaagcttacccaaaaactcaaagtagaactgcaaaaagcaacattgttagtcaggtttatcttaatggagaaaaagaaaaaccaatgacactcactattacacttaatggaactgatgaaaatcaaaccactcccgccagtacatactcaatttcattttcatggagctggcctagcaatcaaacatacattggtcaaacatttgccactaattcctacaccttctcctacattgcccaagaataa

SEQ ID NO: 143 - DNA, 1749 bp, Adenovirus C2
  MISC_FEATURE (1)..(1749): Fiber Gene
atgaaacgcgccagaccgtctgaagacaccttcaaccccgtgtatccatatgacacagaaaccgggcctccaactgtgccctttcttacccctccatttgtttcacccaatggtttccaagaaagtccccctggagttctctctctacgcgtctccgaacctttggacacctcccacggcatgcttgcgcttaaaatgggcagcggtcttaccctagacaaggccggaaacctcacctcccaaaatgtaaccactgttactcagccacttaaaaaaacaaagtcaaacataagtttggacacctccgcaccacttacaattacctcaggcgccctaacagtggcaaccaccgctcctctgatagttactagcggcgctcttagcgtacagtcacaagccccactgaccgtgcaagactccaaactaagcattgctactaaagggcccattacagtgtcagatggaaagctagccctgcaaacatcagcccccctctctggcagtgacagcgacacccttactgtaactgcatcacccccgctaactactgccacgggtagcttgggcattaacatggaagatcctatttatgtaaataatggaaaaataggaattaaaataagcggtcctttgcaagtagcacaaaactccgatacactaacagtagttactggaccaggtgtcaccgttgaacaaaactcccttagaaccaaagttgcaggagctattggttatgattcatcaaacaacatggaaattaaaacgggcggtggcatgcgtataaataacaacttgttaattctagatgtggattacccatttgatgctcaaacaaaactacgtcttaaactggggcagggacccctgtatattaatgcatctcataacttggacataaactataacagaggcctatacctttttaatgcatcaaacaatactaaaaaactggaagttagcataaaaaaatccagtggactaaactttgataatactgccatagctataaatgcaggaaagggtctggagtttgatacaaacacatctgagtctccagatatcaacccaataaaaactaaaattggctctggcattgattacaatgaaaacggtgccatgattactaaacttggagcgggtttaagctttgacaactcaggggccattacaataggaaacaaaaatgatgacaaacttaccctgtggacaaccccagacccatctcctaactgcagaattcattcagataatgactgcaaatttactttggttcttacaaaatgtgggagtcaagtactagctactgtagctgctttggctgtatctggagatctttcatccatgacaggcaccgttgcaagtgttagtatattccttagatttgaccaaaacggtgttctaatggagaactcctcacttaaaaaacattactggaactttagaaatgggaactcaactaatgcaaatccatacacaaatgcagttggatttatgcctaaccttctagcctatccaaaaacccaaagtcaaactgctaaaaataacattgtcagtcaagtttacttgcatggtgataaaactaaacctatgatacttaccattacacttaatggcactagtgaatccacagaaactagcgaggtaagcacttactctatgtcttttacatggtcctgggaaagtggaaaatacaccactgaaacttttgctaccaactcttacaccttctcctacattgcccaggaataa

SEQ ID NO: 144 - DNA, 1746 bp, Adenovirus C5
  MISC_FEATURE (1)..(1746): Fiber Gene
atgaagcgcgcaagaccgtctgaagataccttcaaccccgtgtatccatatgacacggaaaccggtcctccaactgtgccttttcttactcctccctttgtatcccccaatgggtttcaagagagtccccctggggtactctctttgcgcctatccgaacctctagttacctccaatggcatgcttgcgctcaaaatgggcaacggcctctctctggacgaggccggcaaccttacctcccaaaatgtaaccactgtgagcccacctctcaaaaaaaccaagtcaaacataaacctggaaatatctgcacccctcacagttacctcagaagccctaactgtggctgccgccgcacctctaatggtcgcgggcaacacactcaccatgcaatcacaggccccgctaaccgtgcacgactccaaacttagcattgccacccaaggacccctcacagtgtcagaaggaaagctagccctgcaaacatcaggccccctcaccaccaccgatagcagtacccttactatcactgcctcaccccctctaactactgccactggtagcttgggcattgacttgaaagagcccatttatacacaaaatggaaaactaggactaaagtacggggctcctttgcatgtaacagacgacctaaacactttgaccgtagcaactggtccaggtgtgactattaataatacttccttgcaaactaaagttactggagccttgggttttgattcacaaggcaatatgcaacttaatgtagcaggaggactaaggattgattctcaaaacagacgccttatacttgatgttagttatccgtttgatgctcaaaaccaactaaatctaagactaggacagggccctctttttataaactcagcccacaacttggatattaactacaacaaaggcctttacttgtttacagcttcaaacaattccaaaaagcttgaggttaacctaagcactgccaaggggttgatgtttgacgctacagccatagccattaatgcaggagatgggcttgaatttggttcacctaatgcaccaaacacaaatcccctcaaaacaaaaattggccatggcctagaatttgattcaaacaaggctatggttcctaaactaggaactggccttagttttgacagcacaggtgccattacagtaggaaacaaaaataatgataagctaactttgtggaccacaccagctccatctcctaactgtagactaaatgcagagaaagatgctaaactcactttggtcttaacaaaatgtggcagtcaaatacttgctacagtttcagttttggctgttaaaggcagtttggctccaatatctggaacagttcaaagtgctcatcttattataagatttgacgaaaatggagtgctactaaacaattccttcctggacccagaatattggaactttagaaatggagatcttactgaaggcacagcctatacaaacgctgttggatttatgcctaacctatcagcttatccaaaatctcacggtaaaactgccaaaagtaacattgtcagtcaagtttacttaaacggagacaaaactaaacctgtaacactaaccattacactaaacggtacacaggaaacaggagacacaactccaagtgcatactctatgtcattttcatgggactggtctggccacaactacattaatgaaatatttgccacatcctcttacactttttcatacattgcccaagaataa

SEQ ID NO: 145 - DNA, 1587 bp, Adenovirus C6
  MISC_FEATURE (1)..(1587): Fiber Gene
atgaaacgcgccagaccgtctgaagacaccttcaaccctgtgtacccatatgacacggaaaccggccctccaactgtgcctttccttacccctccctttgtgtcgccaaatgggttccaagaaagtccccccggagtgctttctttgcgtctttcagaacctttggttacctcacacggcatgcttgcgctaaaaatgggcagcggcctgtccctggatcaggcaggcaaccttacatcaaatacaatcactgtttctcaaccgctaaaaaaaacaaagtccaatataactttggaaacatccgcgccccttacagtcagctcaggcgccctaaccatggccacaacttcgcctttggtggtctctgacaacactcttaccatgcaatcacaagcaccgctaaccgtgcaagactcaaaacttagcattgctaccaaagagccacttacagtgttagatggaaaactggccctgcagacatcagcccccctctctgccactgataacaacgccctcactatcactgcctcacctcctcttactactgcaaatggtagtctggctgttaccatggaaaacccactttacaacaacaatggaaaacttgggctcaaaattggcggtcctttgcaagtggccaccgactcacatgcactaacactaggtactggtcagggggttgcagttcataacaatttgctacatacaaaagttacaggcgcaatagggtttgatacatctggcaacatggaacttaaaactggagatggcctctatgtggatagcgccggtcctaaccaaaaactacatattaatctaaataccacaaaaggccttgcttttgacaacaccgcaataacaattaacgctggaaaagggttggaatttgaaacagactcctcaaacggaaatcccataaaaacaaaaattggatcaggcatacaatataataccaatggagctatggttgcaaaacttggaacaggcctcagttttgacagctccggagccataacaatgggcagcataaacaatgacagacttactctttggacaacaccagacccatccccaaattgcagaattgcttcagataaagactgcaagctaactctggcgctaacaaaatgtggcagtcaaattttgggcactgtttcagctttggcagtatcaggtaatatggcctccatcaatggaactctaagcagtgtaaacttggttcttagatttgatgacaacggagtgcttatgtcaaattcatcactggacaaacagtattggaactttagaaacggggactccactaacggtcaaccatacacttatgctgttgggtttatgccaaacctaaaagcttacccaaaaactcaaagtaaaactgcaaaaagtaatattgttagccaggtgtatcttaatggtgacaagtctaaaccattgcattttactattacgctaaatggaacagatgaaaccaaccaagtaagcaaatactcaatatcattcagttggtcctggaacagtggacaatacactaatgacaaatttgccaccaattcctataccttctcctacattgcccaggaataa

SEQ ID NO: 146 - DNA, 1089 bp, Adenovirus D8
  MISC_FEATURE (1)..(1089): Fiber Gene
atgacaaagagactccgggtggaagatgacttcaaccccgtctacccctatggctacgcgcggaatcaaaatattcccttcctcactcccccctttgtctcctccaatggatttcaaaacttcccccctggggtcctgtcacttaaactggctgacccaatcaccattaacaatcaaaatgtatcactcaaggttggaggggggctaactttgcaagaagaaactggaaaattaacagttaatactgaaccacctttgcatcttacaaataacaaattagggatagctttagacgctccatttgatgttatagacaataagcttacactattagcaggccatggcttgtctattataacaaaagaaacatcaacactgcctggcttggttaatactcttgtagtattaactggaaagggtattggaacagatttatcaaataatggtggaaatatatgtgttagagttggagaaggcggcggcttatcatttaatgacaatggagacttggtagcatttaataaaaaagaagacaaacgcaccctatggacaactccagacacatctccaaattgcagaattgatcaggataaggactctaagctaactttggtccttacaaagtgtggaagtcaaatattagccaatgtgtcattaattgttgtagctggaaggtacaaaattatcaataacaatactaatccagctcttaaaggatttaccattaaattgttgtttgataaaaatggagtccttatggaatcttcaaatcttggtaaatcatattggaactttcgaaatcaaaattcaattatgtcaacagcttatgaaaaagctattggttttatgcctaatttggtagcctatccaaaacctaccactggctctaaaaaatatgcaagagatatagtttatggaaacatctaccttggcggaaagccacatcaaccagtaaccattaaaactacctttaaccaggaaactggatgtgaatactctattacatttgattttagttgggccaaaacttatgtaaatgttgaatttgaaactacctcttttaccttttcctatattgcccaagaataa

SEQ ID NO: 147 - DNA, 1089 bp, Adenovirus D9
  MISC_FEATURE (1)..(1089): Fiber Gene
atgtcaaagaggctccgggtggaagatgacttcaaccccgtctacccctatggctacgcgcggaatcagaatatccccttcctcactcccccctttgtctcctccgatggattccaaaacttcccccctggggtcctgtcactcaaactggctgacccaatagccatcgtcaatgggaatgtctcactcaaagtgggagggggtctcactttgcaagatggaactggaaaactaacagtcaatgctgatccacctttgcaacttacaaacaacaaattagggattgctttggacgctccatttgatgttatagacaataaactcacattgttagcgggccatggcttgtctattataacaaaagaaacatcaacactgcctggcttgattaatactcttgtagtattaactggaaagggtattggaacagaatcaacagataatggcggaagcgtatgtgttagagttggagaaggtggcggcttatcatttaataatgatggagacttggtagcatttaataaaaaagaagataagcgcaccctatggacaactccagacacatctccaaattgcaagattgatcaagataaggactctaagttaactctggtccttacaaagtgtggaagtcaaatattggctaatgtgtcattaattgtcgtagctggtaagtacaaaattatcaataacaatactcaaccagctctcaaaggatttaccattaaattattgtttgatgaaaatggagtacttatggaatcttcaaatcttggtaaatcatattggaactttagaaatgaaaattcaattatgtcaacagcttatgaaaaagctattggattcatgcctaatttggtagcctatccaaaacctaccgctggctctaaaaaatatgcaagagatatagtttatggaaacatctaccttggtggaaagccagatcaaccagtaaccattaaaactacctttaatcaggaaactggatgtgaatattctatcacatttgattttagttgggccaagacttatgtaaatgttgaatttgaaacaacctcttttaccttttcctatatcgcccaagaatga

SEQ ID NO: 148 - DNA, 1104 bp, Adenovirus D10
  MISC_FEATURE (1)..(1104): Fiber Gene
atggcaaagaggctccgggtggaagatgacttcaaccccgtctacccctatggctacgcgcggaatcagaatatccccttcctcactcccccctttgtctcctccgatggattccaaaacttcccccctggggtcctgtcactcaaactggctgacccaatcgctatcaccaatgggaatgtctcactcaaggtgggagggggacttactgtagagcaacagactggaaacctaagtgtgaaccctgccgcccccttgcaagttgcaagtgataagctacagcttgtcctagctcctccatttgaggtaaaagacggaaaactttcattaaaaacaggcaatggattaaaagtaatagataaaagcatcacagacctaccaggattaatagatacacttgctgttttaactggaaagggaattggaacagaagaactaaaaaatgaaaatggaactaataaaggtgttggtttgcgcgttagactcgctgatgacggtggattaacatttgatgaaaagggtgacctcgtagcatggaatgttaagcatgacactcgcaccctttggacaacaccagacacttctccaaactgcacaattgctcaggataaggactctaaactaactcttgttcttacaaagtgcggaagtcaaatattggcaaatgtgtctttgattgtggtcgcaggaaagtaccacatcataaataataagaataatccagaaataaaaagttttactattaaacttctatttgataagaacggagtgcttttagacaactcaaatcttggaaaaacttattggaactttagaagtggagattccaatgtttcgacagcttatgaaaaagcaattggttttatgcctaatttggtagcgtatccgaaacccagtaattctaaaaaatatgcaagagacatagtttatggaactatatatcttggtggaaaacctgatcagccagcagtcattaaaactacctttaaccaagaaactggatgtgaatactctataacatttgactttagttggtccaaaacctatgaaaatgttgaatttgaaaccacctcttttaccttctcctatatcgcccaacaatga

SEQ ID NO: 149 - DNA, 1146 bp, Adenovirus D13
  MISC_FEATURE (1)..(1146): Fiber Gene
atggcaaagaggctccgggtggaagatgacttcaaccccgtctacccctatgactacgcgcggaatcagaatatccccttcctcactcccccctttgtctcctccgatggattcaaaaacttcccccctggggtcctgtcactcaaactggctgacccaatcaccatagccaatggtgatgtctcactcaaggtgggagggggacttactttgcaagaaggaagtctgactgtagaccctaaggctcccttgcaacttgcaaatgataaaaaacttgagcttgtttatgatgatccatttgaggttagcaccaataaacttagtttaaaagtaggacatggattaaaagtattagatgacaaaagtgctggagggttgaaagatttaattggcaaacttgtggttttaacaggaaaaggaataggtattgaaaatttgcaaaacgacgatggtagtagcagaggggttggtataaatgtaagactcggcacagatggaggtctgtcctttgacaggaaaggtgaattagtagcttggaacagaaaagatgacaggcgaaccctttggacaacacctgatccatcgcccaattgtaaagccgaaacagaaaaggactcaaagcttactttggttctaacaaaatgcggaagtcaaatcttagctactgtgtctattattgttcttaagggtaaatatgaatttgttaaaaaagaaacagagcctaagtcctttgatgttaaattgctgtttgacagcaaaggagtgcttctaccaacttcaaatctttccaaagaatattggaactatagaagttatgataacaacataggaactccttatgaaaatgcagttccatttatgccaaatctaaaagcttatccaaaaccaactaaaactgcttcagataaagcagaaaataaaataagcagtgctaaaaacaaaattgtaagcaacttctactttggagggcaagcatatcaacctgggacaataataattaagtttaatgaggaaatagatgagacatgtgcatactctatcacctttaactttggttggggcaaggtatatgacaatccatttccatttgataccacctcttttaccttctcttatattgcccaagaaaatgaagacaaagactaa

SEQ ID NO: 150 - DNA, 1101 bp, Adenovirus D17
  MISC_FEATURE (1)..(1101): Fiber Gene
atgtcaaagaggctccgggtggaagatgacttcaaccccgtctacccctatggctacgcgcggaatcagaatatccccttcctcactcccccctttgtctcctccgatggattcaaaaacttcccccctggggtcctgtcactcaaactggctgacccaatcaccatagccaatggtgatgtctcactcaaggtgggagggggacttactttgcaagaaggaagtctgactgtagaccctaaggctcccttgcaacttgcaaacaataaaaaacttgagcttgtttatgttgatccatttgaggttagtgccaataaacttagtttaaaagtaggacatggattaaaaatattagatgacaaaagtgctggagggttgaaagatttaattggcaaacttgtggttttaacagggaaaggaataggcactgaaaatttgcaaaatacagatggtagcagcagaggaattggtataagtgtaagagcaagagaagggttaacatttgacaatgatggatacttggtagcatggaacccaaagtatgacacgcgcacactttggacaacaccagacacatctcctaattgcaggattgataaggagaaggattcaaaactcactttggtacttacaaagtgtggaagtcaaatattagctaatgtgtctttgattgtggtgtcaggaaaatatcaatacatagaccacgctacaaatccaactcttaaatcatttaaaataaaacttctttttgataataaaggtgtacttctcccaagttcaaaccttgattccacatattggaactttagaagtgacaatttaactgtatctgaggcatataaaaatgcagttgaatttatgcctaatttggtagcctacccaaaacctaccactggctctaaaaaatatgcaagggatatagtctatgggaacatatatcttggaggtttggcatatcagccagttgtaattaaggttacttttaatgaagaagcagatagtgcttactctataacatttgaatttgtatggaataaagaatatgccagggttgaatttgaaaccacttcctttaccttctcctatattgcccaacaataa

SEQ ID NO: 151 - DNA, 1140 bp, Adenovirus D20
  MISC_FEATURE (1)..(1140): Fiber Gene
atgtcaaagaggctccgggtggaagatgacttcaaccccgtctacccctatggccacgcgcggaatcagaatatccccttcctcactcccccctttgtctcctccgatggattacaaaacttcccccctggtgtcctttcgctaaaactggctgatccaatcgccattgtcaatgggaatgtttcactcaaggtgggagggggaatcactgtggaacaagatagtggacagctaattgcgaatcctaaggctcccttgcaagttgcaaatgacaaattagagctttcttatgcatatccatttgaaactagtgctaataaacttagtttaaaagtagggcaaggactaaaagtgttggatgaaaaagattctggaggattgcaaaatttacttggcaaacttgtagttttaactggaaaaggaataggtgttgaagagttaaaaaaccctgataatactaataggggagttggaattaatgtaagactgggcaaagatggaggtttgtcctttaataaaaatggtgagttagtagcgtggaacaaacacaatgacacacgcactctttggacaactccagacccttctccaaattgtaaaattgaggaagttaaagactcaaaacttactttggttcttacaaaatgcggaagtcagatattggctactatggcttttcaagttgtgaagggaacttatgaaaatatcagtaagaacacagcaaaaaatagcttctcaattaaattgttatttgatgataatggaaaacttttagaaggatctagtttagataaagattattggaacttcagaagtgatgattctattatacccaatcaatacgacaatgcagtgccgtttatgccaaacctaaaagcttatcctaaaccttcaactgtcttgccatctactgacaaaaatagtaatgggaaaaatactattgtttctaacctttatctggaaggaaaggcatatcagccagttgcggttaccattacttttaacaaagagattggctgtacttattcaataacatttgactttggatgggctaaaacctatgatgttccaattccatttgattcttcctcatttaccttctcctatattgcccaagaaaacaaagacacgaacaaataa

SEQ ID NO: 152 - DNA, 1146 bp, Adenovirus D24
  MISC_FEATURE (1)..(1146): Fiber Gene
atgacaaagaggctccgggtggaagatgacttcaaccccgtctacccctatggctacgcgcggaatcagaatatccccttccttactcccccctttgtttcttccgatggattccaaaacttcccacctggggtcctgtcactcaaactggctgacccaatcgccatcactaatggggatgtttcactcaaggtgggagggggtcttactgttgaaaaagatagtggaaatctaaaggtgaaccctaaggctcccttgcaagttacaactgataaacagttggaaattgcactggcttatccatttgaagtcagtaatggcaagcttggcataaaagcaggtcatggattgaaagtcattgacaaaattgctggtttggaaggtttggcaggtacgcttgtagttttgactggaaaaggaataggtactgaaaatcttgaaaacagtgatgggtcaagtagaggagttggtataaacgtaagacttgctaaagatggaggtctgtcttttgataaaaagggtgatttagttgcttggaataaacatgatgacagacgcactctatggacaactcccgacccatccccaaattgtacaatcgatcaggaaagggattcaaagctcactttagtattaacaaaatgtggcagtcaaattttggctaatgtctctttacttgttgtaaaaggaaaatttagtaacataaacaataatactaatccaactgataaaaaaatcacagtaaagctactttttaatgaaaagggagtattaatggacagttcgacacttaagaaagaatattggaactacagaaatgataattctactgtatctcaggcctatgataatgcagttccttttatgccaaacataaaagcttatcctaaacctaccacagacacttcggctaaaccagaagataaaaaaagtgctgctaaaagatacattgtgagcaatgtctatattggaggcttgccagataaaactgttgttataactattaagtttaatgcagaaactgaatgtgcttattcgattacctttgaattcacatgggcaaaaacctttgaagatgtgcagtttgattcctcctcttttaccttttcctatattgcccaagaaaatgaggacgaagacaaataa

SEQ ID NO: 153 - DNA, 1098 bp, Adenovirus D25
  MISC_FEATURE (1)..(1098): Fiber Gene
gtggaagatgacttcaaccccgtctacccctatggctacgcgcggaatcagaatatccccttcctcactcccccctttgtctcctccgatggattccaaaactttccccctggtgtgctgtcactcaaattggctgacccaatcactatcagtaatggcgatgtctcactcaaggtgggagggggactcactgtggaacaagatagtggaaacctaagtgtgaaccctaaggctccattgcaagttggaacagacaaaaaactggaattggctttagcacctccatttaatgttaaagataacaagctagatctgctagtaggagatggattaaaggtaatagataaatcaatatctgaattgccaggattgttaaactatcttgtagttttgactggcaaaggaattggaaatgaagaattaaaaaatgacgatggtagcaataaaggagtcggtttatgtgtgagaattggagaaggaggtggtttaacttttgatgataaaggttatttagtagcatggaacaagaaacatgacatccgcacactttggacaactttagacccttctccaaattgtagaattgatgtggacaaggactctaaactaacattggtccttacaaagtgcggaagtcagatattggctaatgtatctcttcttgttgtcaaaggaaggtttcaaaacctaaattacaaaacaaacccaaaccttcctaaaacatttacaataaaattactgtttgatgaaaatgggattcttaaagactcatcaaatcttgacaagaactattggaactatagaaacggaaattctattttagcagagcaatataaaaatgcagttggctttatgccaaatttagcagcttatcccaaatctaccaccactcagtctaaactttatgcaagaaacactatttttggaaatatttacctagattcgcaagcatataatccagtggttattaaaattacttttaatcaagaagcagatagtgcttattctatcactttaaactattcatggggtaaggattatgaaaatatcccttttgattctacttcttttaccttttcctatatcgcccaagaatga

SEQ ID NO: 154 - DNA, 1125 bp, Adenovirus D26
  MISC_FEATURE (1)..(1125): Fiber Gene
atggcaaagaggctccgggtggaagatgacttcaaccccgtctacccctatggctacgcgcggaatcagaatatccccttcctcactcccccctttgtctcctccgatggattcaaaaacttcccccctggggtcctgtcacttaaactggctgatccaatcaccatcaacaatggggatgtctcacttaaggtgggagggggacttgctgtagagcaacagactggtaacctaagcgtaaaccctgatgcacccttgcaagttgcaagtgataagctacagcttgctctggctcctccattcgaggtcagagatggaaagcttgctttaaaggcaggtaatggattaaaagtactagataattccattactggattgactggattattgaatacacttgtggtattaactggaaggggaataggaacggaggaattaaaaaatgacgatggtgtaacaaacaaaggagtcggcttgcgtgtaagacttggagatgacggcgggctgacatttgataaaaagggtgatttagtagcctggaataaaaaagatgacaggcgcaccctgtggacaacccctgacacatctccaaattgcaaaatgagtacagaaaaggattctaaacttacgttgacacttacaaagtgtggaagtcaggttctgggaaatgtatctttacttgcagttacaggtgaatatcatcaaatgactgctactacaaagaaggatgtaaaaatatctttactatttgatgagaatggaattctattaccatcttcgtcccttagcaaagattattggaattacagaagtgatgattctattgtatctcaaaaatataataatgcagttccattcatgccaaacctgacagcttatccaaaaccaagcgctcaaaatgcaaaaaactattcaagaactaaaatcataagtaatgtctacttaggtgctcttacctaccaacctgtaattatcactattgcatttaatcaggaaactgaaaatggatgtgcttattctataacatttaccttcacttggcaaaaagactattctgcccaacagtttgatgttacatcttttaccttctcatatcttacccaagagaacaaagacaaagactaa

SEQ ID NO: 155 - DNA, 1104 bp, Adenovirus D27
  MISC_FEATURE (1)..(1104): Fiber Gene
atgtcaaagaggctccgggtggaagatgacttcaaccccgtctacccctatggctacgcgcggaatcagaatatccccttcctcactcctccctttgtctcctccgatggattcaaaaacttccccccaggggtcctgtcactcaaactggctgacccaatcaccataactaatggagatgtctcgctcaaggtgggagggggacttgttgtggaaaaagagtctggaaagctaagtgttgaccctaagactcccttgcaagttgcaagtgacaacaaattggagctttcttataatgctccatttaaagttgaaaatgacaagctatcacttgatgtaggccacggattaaaagttataggcaatgaagtatcaagcttgcctggattaataaataagcttgttgttttaactgggaagggaattggcactgaagagttaaaagaacaaaacagtgataaaataataggagttggaattaatgtaagagcaagaggaggattgtcatttgacaatgatggctacttagtagcttggaatccaaagtatgatacacgtacactttggacaactccagacacatctcctaattgcaagatgcttacaaaaaaggactcaaagcttacactcacacttacaaagtgcggaagtcaaattttaggaaacgtatctttacttgctgtttcgggaaagtatcttaatatgacaaaggacgaaacaggagttaagataattttactatttgacagaaatggagttcttatgcaggaatcatcactcgataaagaatattggaactatagaaatgacaataatgttatcggaactccttatgaaaatgcagtggggtttatgccaaacttagtggcatatcctaaaccgacaagtgcagatgcaaaaaactattcaagaagcaagataataagtaatgtatacttaaagggtcttatatatcaaccagtaattataattgccagttttaatcaggaaaccactaatggttgtgtctattctatttcatttgatttcacctgttcaaaggattacactggccaacaatttgatgttacctcattcactttctcctatatcgcccaagaatga

SEQ ID NO: 156 - DNA, 1149 bp, Adenovirus D33
  MISC_FEATURE (1)..(1149): Fiber Gene
atgtcaaagaggctccgggtggaagatgacttcaaccccgtctacccctatggctacgcgcggaatcagaatatccccttcctcactcccccctttgtctcctccgatggattccaaaacttcccccctggtgtcctgtcactcaaactggctgacccaatcaccatcgccaatgggaatgtttcactcaaggtgggagggggactcactctggaacaagatagtggaaagctaattgtgaatcctaaggctcccttgcaagttgcaaatgacaaattagagctttcttacgcagatccatttgaaactagtgctaataaacttagtttaaaagtagggcatggactaaaagtgttggatgagaaaaatgctggaggattgaaagatttaattggcacacttgtagttttaactggaaaaggaataggcgttgaagagttaaaaaacgctgataatactaataggggagttggaattaatgtaagactgggtaaagatggaggtttgtcctttgataaaaaaggcgacttagtagcttggaataagcatgatgacagacgcactttatggacaactccagacccatctccaaattgtacaattgatgaggaaagagattcaaagctcactttagtgttaacaaaatgcggtagtcaaattttggccaatgtctctttacttgttgtaaaaggaaaatttagtaacataaacaataatactaatccaactgataaaaaaatcacagtgaagctactttttaatgaaaagggagtattaatggacagttcgtcacttaaaaaagaatattggaactacagaaatgataattctactgtatctcaggcctatgataatgcagttccttttatgccaaacataaaagcttatcctaaacctaccacagacacttcagctaaaccagaagataaaaaaagtgctgctaaaagatacattgtgagcaatgtctatattggaggcttgccagataaaactgttgttataactattaagttgaatgcagaaactgaatctgcttattcaatgacctttgaatttacatgggcaaaaacatttgaaaatttgcagtttgattcctcctcttttaccttctcctatattgctcaagaaaatgaggacgaagacaaataa

SEQ ID NO: 157 - DNA, 1098 bp, Adenovirus D37
  MISC_FEATURE (1)..(1098): Fiber Gene
atgtcaaagaggctccgggtggaagatgacttcaaccccgtctacccctatggctacgcgcggaatcagaatatccccttcctcactcccccctttgtctcctccgatggattcaaaaacttcccccctggggtactgtcactcaaactggctgatccaatcaccattaccaatggggatgtatccctcaaggtgggaggtggtctcactttgcaagatggaagcctaactgtaaaccctaaggctccactgcaagttaatactgataaaaaacttgagcttgcatatgataatccatttgaaagtagtgctaataaacttagtttaaaagtaggacatggattaaaagtattagatgaaaaaagtgctgcggggttaaaagatttaattggcaaacttgtggttttaacaggaaaaggaataggcactgaaaatttagaaaatacagatggtagcagcagaggaattggtataaatgtaagagcaagagaagggttgacatttgacaatgatggatacttggtagcatggaacccaaagtatgacacgcgcacactttggacaacaccagacacatctccaaactgcacaattgctcaagataaggactctaaactcactttggtacttacaaagtgtggaagtcaaatattagctaatgtgtctttgattgtggtcgcaggaaagtaccacatcataaataataagacaaatccaaaaataaaaagttttactattaaactgctatttaataagaacggagtgcttttagacaactcaaatcttggaaaagcttattggaactttagaagtggaaattccaatgtttcgacagcttatgaaaaagcaattggttttatgcctaatttggtagcgtatccaaaacccagtaattctaaaaaatatgcaagagacatagtttatggaactatatatcttggtggaaaacctgatcagccagcagtcattaaaactacctttaaccaagaaactggatgtgaatactctatcacatttaactttagttggtccaaaacctatgaaaatgttgaatttgaaaccacctcttttaccttctcctatattgcccaagaatga

SEQ ID NO: 158 - DNA, 1116 bp, Adenovirus D69
  MISC_FEATURE (1)..(1116): Fiber Gene
atgtcaaagaggcttcgggtggaagatgacttcaaccccgtctacccctatgactacgcgcggaatcagaatatccccttcctcactcccccctttgtctcctccgatggattccaaaacttcccccctggtgtcctgtcactcaaattggctgacccaatcgctatcaccaatggtgatgtctcactcaaggtgggagggggacttactttacaagatggaaccggaaaactaactatcgacaccaagactcccttgcaagttgcaaataataaattagaacttgcgtttgatgcaccattgtatgaaaaaaatggaaaacttgctttaaaaacaggccatggattagctgttttaaccaaagacattggcataccagaattaattggatcccttgtgatcttaactggaaaaggaattgggacaggtactgttgcaggaggaggaactatagatgtaagactgggtgatgatggaggtttatcatttgataaaaagggtgatctagtagcctggaataaaaaaaatgacaggcgcactttgtggacaacacctgatccatccccaaactgcagagtatcagaagataaagattcaaaactaactttaattcttacaaaatgtggaagtcagatcctagcaagtttttcactgcttgtagtcaaagggacgtatgcaactgttgataaaaatacaactaataaacaatttagcattaaactactgtttgatgcaaatggaaagcttaaaagcgaatcaaaccttagtggttattggaactatagaagtgataatagtgttgttagtactccctatgacaatgcagtgcctttcatgccaaataccacggcttatccaaaaatcattaatagtacaactgatcctgaaaataagaaaagttcggctaaaaaaactattgttggcaatgtctacctagaaggtaatgcgggtcaaccagtagccgttgctattagtttcaataaggaaactactgctgactattcaataacatttgactttgcgtggagcaaagcttatgaaacccctgtgccttttgacacctcctccatgacattctcatatattgcccaggaaaatcaagacaaaggcgaataa

SEQ ID NO: 159 - DNA, 1278 bp, Adenovirus E4
  MISC_FEATURE (1)..(1278): Fiber Gene
atgtccaaaaagcgcgcgcgggtggatgatggcttcgaccccgtgtatccctacgatgcagacaacgcaccgaccgtgcccttcatcaaccctcccttcgtctcttcagatggattccaagaaaagcccctgggggtgttgtcccttaggctggccgaccctgtcaccaccaagaatggggaaattaccctcaagctgggggagggggtggaccttgacgactcgggaaaactcattgcaaacacagtaaacaaggccattgcccctctcagtttttccaacaacaccatttcccttaacatggatacccctttatacaccaaagatggaaaactatccttacaagtttctccaccattaagtatattaaaatcaacaattttgaatacattagctctagcttttggctcaggtttaggactcagtggcagcgccctggcagtacagttagcctctccacttacatttgatgataaagggaatataaagattaccctaaacaggggattgcatgttacaacaggagatgcaattgaaagcaacatcagttgggctaaaggtataaaatttgaagatggtgccatagctacaaacattggtaaggggctagagttcggaaccagtagtacagaaacaggagttaataatgcttatccaatccaagttaaacttggctctggtctcagctttgacagcacaggagccataatggctggcaataaagactatgataaattaactttgtggacaacgcctgacccatcaccaaactgtcaaatacttgcagaaaatgatgcaaaactaacactttgcttaactaagtgtgacagtcaaatactggccactgtatcagttttggttgttagaagtggaaacttaaacccaattactggcacagtaagcagtgctcaagtttttctacgttttgatgcaaatggtgttcttttaacagaacactctacactaaaaaaatactggggctacaagcaaggagatagcatagatggcactccatacaccaatgctgttggttttatgccaaattcaacagcttatccaaagacccaaagttctactactaaaaataatatagtgggtcaagtatacatgaatggagatgtttcaaaacccatgcttcttactataactcttaatggtactgatgacaccaccagtgcatactcaatgtcattttcatacacctggactaacggaagctatatcggagcaacatttggagctaactcatacaccttctcctacatagcccaacaataa

SEQ ID NO: 160 - DNA, 1683 bp, Adenovirus G52
  MISC_FEATURE (1)..(1683): Fiber Gene
atgaaacgggccagagttgatgaagacttcaacccagtgtacccttatgaccccccacatgctcccgttatgcccttcattactccaccttttacctcctcggatgggttacaggaaaaaccacttggagtgttaagtttaaactacagagatcccattactacgcaaaatgggtctcttacaattaaactaggaaacggcctcactctagacaaccagggacaactaacatcaaccgctggggaagtagaacctccactcactaacgctaacaacaaacttgcactggtctatagggaacctttagcagtaaagcgcaacagcctaaccttatcgcacaccgctccccttgttattgctgataactctttagcattgcaagtttcagagcctatttttataaatgacaaggacaaactagccctgcagacagccgcgccccttgtaactaacgctggcacccttcgcttacagagcgccgcccctttaggcattgcagaccaaaccctaaaactcctgtttaccaaccctttgtacttgcagaataactttctcacgttagccattgaacgaccccttgccattaccaatactggaaagctggctctacagctctccccaccgctacaaacagcagacacaggcttgactttgcaaaccaacgtgccattaactgtaagcgacgggaccctaggcttagccataaagcgcccacttattgttcaggacaacaacttgtttttggacttcagagctcccctgcgtcttttcaacagcgaccccgtactagggcttaacttttacacccctcttgcagtgcgcgatgaggcgctcactgttaacacaggccgcggcctcacagtgagttacgatggtttaattttaaatcttggtaaggatcttcgcttcgacaacaacaccgtttctgtcgctcttagtgctgctttgcctttacaatacactgatcagcttcgccttaacgtgggcgctgggctgcgttacaatccagtgagtaaaaaattggacgcgaaccccaatcaaaacaagggtttaacctgggaaaatgactacctcattgtaaagctaggaaatggattaggttttgatggcgatggaaacatagctgtttctcctcaagttacatcgcctgacaccttatggaccactgccgatccatcccccaattgttccatctacactgatttagatgccaaaatgtggctctcgttggtaaaacaagggggtatggttcacggttctgttgctttaaaagcattgaaaggaaccctattgagtcctacggaaagtgccattgttattatactacattttgacaattatggagtgcgaattctcaattatcccactttgggcactcaaggcacgttgggaaataatgcaacttggggttataggcagggagaatctgcagacactaatgtactcaatgcactagcatttatgcccagttcaaaaaggtacccaagagggcgtggaagcgaagttcagaatcagactgtgggctacacttgtatacagggtgacctttctatgcccgtaccgtaccaaatacagtacaactatggaccaactggctactcctttaaatttatttggagaactgtttcaagacaaccatttgacatcccatgctgttttttctcttacattacggaagaataa

SEQ ID NO: 161 - DNA, 1494 bp, Adenovirus A12
  MISC_FEATURE (1)..(1494): Fiber Gene
atgaggcgcgcggtggaactgcagacagtggcttttcctgagacaccacctccctcttacgaaaccgtgatggcagcggcgccaccctacgtgcctccccgctatttgggtcctacggagggaagaaacagtatccgttactcggaattgtcaccgttgtacgataccactcgagtgtacttggtggacaacaagtcttctgacattgcttcattgaattaccagaatgatcacagcaactttttaaccactgtagtgcaaaataatgactattcccctatagaggctggcacgcaaactattaactttgatgaaaggtctagatggggtggagatttaaaaaccatcttacataccaacatgccaaacgtgaacgattttatgtttaccaccaaatttaaggccagggtaatggtggctaggaaaacaaacaacgaaggccaaaccattttagaatatgagtgggcagaatttgtgctacccgagggtaactattcggaaaccatgactattgacttaatgaacaatgctattattgagcattatttgcgagtaggaagacagcatggagtgctggaaagtgacattggagttaagtttgacaccagaaactttcgtctgggttgggaccccgaaacccaattagtaactccgggagtgtacactaatgaggcttttcatccagatatagtactgcttccaggttgcggggttgattttacagagagcagattaagcaacatactaggtataagaaagaggcagccgtttcaggaaggatttgtgattatgtatgaacacttagagggaggcaatattccagctcttttggatgtaaaaaaatacgaaaacagtctgcaggatcaaaacactgtaagaggagacaactttattgccttaaataaggctgctaggattgaaccggttgaaacagaccccaaaggacgcagttacaacttgcttccagacaaaaaaaatactaaatatcgcagctggtatttggcatacaactacggagacccagaaaaaggagttcggtcatggactctactaacaactccagatgtaacaggcggctccgaacaggtgtactggtccctacccgatatgatgcaagatccggtgacttttcgctcctcgcgtcaagttagcaactatcctgtagttgcagcagaattactgccagttcatgctaaaagcttctacaacgagcaagccgtctactcacagcttattcgccagtcaaccgcgcttacgcgcgtgtttaatcgctttcccgagaaccagatactggtgcgtccaccagccgctaccatcactaccgtcagtgaaaacgttcccgcccttacagatcacgggaccctgccgctgcgtagcagtatcagtggagttcagcgagtcaccatcactgacgcccgccgccggacctgtccctacgtttacaaagcactgggcatagtttctccacgagtgctttctagtcgcactttttaa

SEQ ID NO: 162 - DNA, 1524 bp, Adenovirus A18
  MISC_FEATURE (1)..(1524): Penton Gene
atgaggcgtgcggtggaactccagccagtggcttttgctgaggcgccacctccctcttatgaaaccgtgatggcagcagcggcagcccaaccttctacactggaagcaccctacgtgcctccccgatacttgggtcctacggagggaagaaacagtatccgttattcagaattatccccattgtatgataccactcgggtgtatctggtggataacaaatcatctgacattgcttcgctgaattaccaaaacgatcacagcaactttttaactactgtggtgcagaataacgactactcccctattgaggccggcacgcagactattaactttgatgaacggtctcgttggggtggggatttgaaaacaatactgcgtaccaacatgccaaatgtgaacgatttcatgttcacaaccaaatttaaagctaaggttatggttgccagggaaaaaaataaagaagatccatccaaagatattttgaagtatgaatgggcagaatttgttttgcctgagggtaactattctgaaaccatgaccattgatctaatgaataacgccattattgagcactacctgttagtaggaagacaaaatggagtgctggaaagcgacataggagttaagtttgacacgagaaactttcgcctgggctgggaccccgagactaaacttattacgccgggtgtttacacaaatgaggcgtttcacccagacatagtactcttgcctggatgcggcgttgactttacagagagcagattaagtaacgttcttggcattaggaagcgccagccttttcaggaaggatttattattatgtatgaggacttagagggaggaaacattccggctcttctggatgtaaaaaagtacgaagacagcctgaagaatgagagcgccataagaggagacaattttactgcgttgatgaaagtcgctacaattgaaccagtggcagcggattccaaagggcgcagttacaacttgcttccagacaaaaaaaatactgagtatcgcagctggtacttggcatacaactacggagactcagaaaaaggggtccggtcttggactctcttaactaccccagatgtcacaggcggctctgagcaggtgtactggtcactaccggacatgatgcaagatccggtgactttccgctcgtcgcgtcaagttagcaactacccggtagttgcggcagaactgttaccggttcacgctaaaagtttctacaacgatcaagccgtctactcgcagctcattcgccagtcaaccgcgcttacacacgtgtttaatcgctttcccgagaaccagatattggtgcgcccaccagccgctaccatcactaccgtcagtgaaaacgttcccgccctcacagatcacggaaccctgccgctgcgcagcagtatcagtggagttcagcgagtcaccatcactgacgcccgccgccggacctgtccctacgtttacaaagcactgggcatagtttcaccacgtgtgctttctagtcgcactttttaa

SEQ ID NO: 163 - DNA, 1518 bp, Adenovirus A31
  MISC_FEATURE (1)..(1518): Penton Gene
atgaggcgcgcggtggaactgcagacagtggcttttcccgaggcaccaccaccctcttacgaaaccgtgatggcagcagctcaaacttccgcactggaagctccctacgtgcctccccgctatttggctcctacggagggaagaaatagcattcgttattcagaattgtcaccgttatacgataccactcgagtgtacttagtggacaacaagtcttctgatatcgcttctttaaactaccaaaatgatcacagcaactttctaaccactgtagtccaaaacaacgactattcccctatagaagccggtacacaaactattaattttgacgaaaggtcccgatggggcggtgatttgaaaactattttgcatactaacatgcccaacgtaaatgattttatgtttacaactaaatttaaggccagggtaatggtgtctagaaaaaaagatagtgaagaccagtccaaagacattttgaaatacgagtgggcagaatttgtgttacccgaaggtaactactcggaaaccatgactatcgacttaatgaacaacgcaatcatcgagcattacttgcgagttggccgtcagaacggtgtgctagaaagcgacattggagttaagtttgacaccagaaactttcgcctgggttgggaccccgaaactaaattagtgactccgggagtgtatactaacgaggcttttcatccagatatagtattgctaccaggatgcggagtggacttcacggagagcagattaagcaacatgctgggaatcagaaaaagacagccttttcaggagggttttgttatcatgtatgaagacttagaagggggaaatatcccagcgcttttagatgttaaaaaatacgaagacagcttgcagccagacaacaccgtaagaggtgacaactttattgccttaaacaaggccgcaaaaatcgaagcagtcgaggctgattccaaaggccgaagttacaacttgcttcccgacaaaaaaaatactaagtaccgtagctggtatttggcatacaactatggagatccagaaaaaggtgttcgttcttggactcttctaacaaccccagacgtgacaggcggttccgagcaggtctattggtcgcttcccgatatgatgcaagatccggtgacttttcgctcctcgcgtcaagtcagcaactatccggtagttgcggccgaactaatgccggttcacgccaaaagcttctacaacgaacaagccgtctactcacagcttatccgccagtcaaccgcgcttacacacgtgtttaatcgctttcccgagaaccagatactagtgcgtccaccagctgctaccatcactaccgtcagtgaaaacgttcccgctctcacagatcacgggaccctgccgctgcgtagcagtatcagtggagttcagcgagtcaccatcactgacgcccgccgccggacctgtccttacgtttacaaagcactgggcatagtttctccacgagtactttctagtcgcactttctaa

SEQ ID NO: 164 - DNA, 1635 bp, Adenovirus B3
  MISC_FEATURE (1)..(1635): Penton Gene
atgaggagacgagccgtgctaggcggagcggtggtgtatccggagggtcctcctccttcttacgagagcgtgatgcagcaacaggcggcgatgatacagcccccactggaggctcccttcgtacccccacggtacctggcgcctacggaagggagaaacagcattcgttactcggagctgtcgcccctgtacgataccaccaagttgtatctggtggacaacaagtcggcggacatcgcctccctgaactatcagaacgaccacagcaacttcctgaccacggtggtgcagaacaatgactttacccccacggaggctagcacccagaccatcaactttgacgagcggtcgcgatggggcggtcagctgaagaccatcatgcacaccaacatgcccaacgtgaacgagtacatgttcagcaacaagttcaaggcgagggtgatggtgtccagaaaagctcctgaaggtgttacagtaaatgacacctatgatcataaagaggatatcttgaagtatgagtggtttgagttcattttaccagaaggcaacttttcagccaccatgacgatcgacctgatgaacaatgccatcattgacaactacctggaaattggcagacagaatggagtgctggaaagtgacattggtgttaagtttgacactagaaatttcaggctcgggtgggaccccgaaactaagttgattatgccaggtgtctacacttatgaggcattccatcctgacattgtattgctgcctggttgcggggtagactttactgaaagccgacttagcaacttgcttggcatcaggaagagacatccattccaggagggtttcaaaatcatgtatgaagatcttgaagggggtaatattcctgcccttttggatgtcactgcctatgaggaaagcaaaaaggataccactactgaaacaaccacactggctgttgcagaggaaactagtgaagatgatgatataactagaggagatacctatataactgaaaaacaaaaacgtgaagctgcagctgctgaagttaaaaaagagttaaagatccaacctctagaaaaagacagcaagagtagaagctacaatgtcttggaagacaaaatcaacacagcctaccgcagttggtacctgtcctacaattacggtaaccctgagaaaggaataaggtcttggacactgctcaccacttcagatgtcacctgtggggcagagcaggtctactggtcgctccctgacatgatgcaagacccagtcaccttccgctccacaagacaagtcaacaactacccagtggtgggtgcagagcttatgcccgtcttctcaaagagtttctacaatgagcaagccgtgtactctcagcagctccgacaggccacttcgctcacgcacgtcttcaaccgcttccctgagaaccagatcctcatccgcccgccggcgcccacaattaccaccgtcagtgaaaacgttcctgctctcacagatcacgggaccctgccgttacgcagcagtatccggggagtccagcgcgtgaccgttactgacgccagacgccgcacctgtccctacgtttacaaggccctgggcatagtcgcgccgcgcgttctttcaagccgcactttctaa

SEQ ID NO: 165 - DNA, 1563 bp, Adenovirus B7
  MISC_FEATURE (1)..(1563): Penton Gene
atgcagcaacaggcggcgatgatacagcccccactggaggctcccttcgtacccccgcggtacctggcgcctacggaagggagaaacagcattcgttactcggagctgtcgcccctgtacgataccaccaagttgtatctggtggacaacaagtcggcggacatcgcctccctgaactatcagaacgaccacagcaacttcctgaccacggtggtgcagaacaatgactttacccccacggaggctagcacccagaccatcaactttgacgagcggtcgcgatggggcggtcagctgaagaccatcatgcacaccaacatgcccaacgtgaacgagtacatgttcagcaacaagttcaaggcgagggtgatggtgtccagaaaggctcctgaaggtgttatagtaaatgacacctatgatcataaagaggatatcttaaagtatgagtggtttgagttcactttaccagaaggcaacttctcagccaccatgaccattgacctgatgaacaatgccatcattgacaactacctggaaattggcagacaaaatggagtgctggaaagtgacattggtgttaagtttgacactagaaactttaggctcgggtgggaccccgaaactaagttaattatgccaggagtctacacttatgaggcattccatcctgacattgttttgctgcctggctgcggggtagactttactgaaagccgacttagcaacttgcttggcatcaggaaaagacatccattccaggagggtttcaaaatcatgtatgaagatcttgaagggggtaatattcctgcccttttggatgtcactgcctatgaggaaagcaaaaaggataccactactgaaacaaccacactggctgttgcagaggaaactagtgaagatgataatataactagaggagatacctatataactgaaaaacaaaaacgtgaagctgcagctgctgaagttaaaaaagagttaaagatccaacctctagaaaaagacagcaagagtagaagctacaatgtcttggaagacaaaatcaacacggcctaccgcagctggtacctgtcctacaattacggtaaccctgagaaaggaataaggtcttggacactgcttaccacttcagatgtcacctgtggggcagagcaggtctactggtcgctccctgacatgatgcaagacccagtcaccttccgctccacaagacaagtcaacaactacccagtggtgggtgcagagcttatgcccgtcttctcaaagagtttctacaatgagcaagccgtgtactctcagcagctccgacaggccacttcgctcacgcacgtcttcaaccgcttccctgagaaccagatcctcatccgcccgccggcgcccacaattaccaccgtcagtgaaaacgttcctgctctcacagatcacgggaccctgccgttacgcagcagtatccggggagtccagcgcgtgaccgttactgacgccagacgccgcacctgtccctacgtttacaaggccctgggcatagtcgcgccgcgcgttctttcaagccgcactttttaa

SEQ ID NO: 166 - DNA, 1668 bp, Adenovirus B16
  MISC_FEATURE (1)..(1668): Penton Gene
atgaggagacgagccgtgctaggcggagcggtggtgtatccggagggtcctcctccttcttacgagagcgtgatgcagcaacaggcggcgatgatacagcccccactggaggctcccttcgtaccccctcggtacctggcgcctacggaagggagaaatagcattcgttactcggagctgtcaccccagtacgataccaccaagttgtatctggcggacaacaagtcggcggacatcgcctccctgaactatcagaacgaccacagcaacttcctgaccacagtggtgcagaacaatgactttacccccacggaggctagcacccagaccattaactttgacgagcggtcgcggtggggcggtcagctgaagaccattatgcacaccaacatgcccaacgtgaacgagtacatgttcagcaacaagtttaaggcgagggtgatggtatctaggaaggctcctgaaggtgttacagtaaatgatcataaagatgatattttgaaatatgagtggtttgagttcactttaccagaaggtaacttctcagctaccatgaccatcgacctgatgaacaatgccatcattgacaactacctgaaaattggcagacagaatggagtgctggaaagtgacattggtgttaagtttgacactagaaacttcaggctcgggtgggaccccgaaactaagttgattatgccaggggtctacacttatgaggcattccatcctgacattgttttgttgcctggttgcggggtagattttactgaaagccgacttagcaacttgcttggcatcaggaagagacatccattccaggagggtttcaaaatcatgtatgaagatcttgaagggggtaatattcctgcccttttggatgtcactgcctatgaggaaagcaaaaaggataccactactgaaacaggcgaaaaggcggtggttaaaacaaccacagtggctgttgcagaggaaaccagtgaagatgataatataactagaggagatacttatataactgaaaaacaaaaacgtgaagctgcagctgcagaactattacttatgtctgaagttaaaaaagagttaaagatccaacctttagaaaaagacagcaagaatagaagctacaatgtcttggaagacaaaatcaacacagcctaccgcagctggtacctgtcctacaattatggtaaccctgagaaaggaataaggtcctggacactgctcaccacttcggatgtcacctgtggagccgagcaggtctactggtcgctccccgacatgatgcaagaccccatcaccttccgctcctcgagacaagtcaacaactacccagtagtgggtgcagagcttatgccggtcttctcaaagagtttctacaatgagcaagccgtgtactctcagcagctccgacagtccacctcgctcacgcacgtcttcaaccgcttccctgagaaccagatcctcatccgcccgccggcgcccacaattaccaccatcagtgaaaacgttcctgctctcacagatcacgggaccctgccgttacgcagcagtatccggggagtccagcgcgtgaccgttactgacgccagacgtcgcacctgtccctacgtttacaaggccctgggcatagtcgcgccgcgcgttctttcaagccgcactttctaa

SEQ ID NO: 167 - DNA, 1686 bp, Adenovirus B21
  MISC_FEATURE (1)..(1686): Penton Gene
atgatgaggcgaaccgtgctaggcggagcggtggtgtatccggagggtcctcctccttcgtacgagagcgtgatgcagcaggcggcggcggcgacgatgcagccaccactggaggctccctttgtaccccctcggtacctggcacctacggaggggagaaacagcattcgttactcggagctggcaccattgtatgataccacccggttgtatttggtggacaacaagtccgcggacatcgcctcactgaactatcagaacgaccacagcaacttcctcaccacggtggtgcaaaacaatgactttacccccacggaggccagcacccagaccatcaactttgacgagcggtcgcgatggggcggtcagctgaagactatcatgcacaccaacatgcccaacgtgaacgagtacatgtttagcaacaagttcaaagctcgggtgatggtgtctagaaaggctcctgaaggtgtcacagtagatgacaattatgatcacaagcaggatattttggaatatgagtggtttgagtttactctaccggaagggaatttctcagccacaatgaccattgacctaatgaacaatgccatcattgataattaccttgaagtgggcagacagaatggagtgttagagagtgacattggtgttaaatttgacaccaggaactttagactgggttgggatccggaaactaagttgattatgcctggggtttacacctatgaggcattccatcctgacattgtattgttgcctggttgcggagttgactttactgaaagtcgccttagtaacttgcttggtatcaggaaaagacacccattccaggagggttttaagatcttgtatgaggatcttgaagggggtaatatcccggccctgttggatgtagaagcctatgagaacagtaagaaagaacaagaagccaaaacagaagccgctaaagctgctgctattgctaaagccaacatagttgtcagcgaccctgtaagggtggctaatgcagaagaagtcagaggagacaactatacagcttcatctgttgcaactgacgaatcgctattggctgctgtggccgaaactacagagacaaaactcactattaaacctgtagaaaaagacagcaagagtagaagttacaatgtcttggaagataaagtgaatacagcctaccgcagctggtacctgtcctacaactatggtgaccctgaaaaaggagtccgttcctggacactgctcaccacctcggatgtcacctgtggagcagagcaggtgtactggtcgctcccagacatgatgcaggaccctgtcacattccgttccacgagacaagtcagcaactatccagtggtaggtgcagagctcatgccggtcttctcaaagagtttctacaacgagcaagccgtgtactcccagcagcttcgccagtccacctcgctcacgcacgtcttcaaccgcttccctgagaaccagatcctcatccgcccgccagcgcccaccattaccaccgtcagtgaaaacgttcctgctctcacagatcacgggaccctgccgttgcgcagcagtatccggggagtccagcgcgtgaccgttactgacgccagacgccgcacctgcccctacgtctacaaggccctgggcatagtcgcgccgcgcgtcctttcaagccgcactttctaa

SEQ ID NO: 168 - DNA, 1686 bp, Adenovirus B50
  MISC_FEATURE (1)..(1686): Penton Gene
atgatgaggcgaaccgtgctaggcggagcggtggtgtatccggagggtcctcctccttcgtacgagagcgtgatgcagcaggcggcggcggcggcgatgcagccaccactggaggctccctttgtaccccctcggtacctggcacctacggaggggagaaacagcattcgttactcggagctggcaccattgtatgataccacccggttgtatttggtggacaacaagtccgcggacatcgcctcactgaactatcagaacgaccacagcaacttcctcaccacggtggtgcaaaacaatgactttacccccacggaggccagcacccagaccatcaactttgacgagcggtcgcgatggggcggtcagctgaagactatcatgcacaccaacatgcccaacgtgaacgagtacatgtttagcaacaagttcaaagctcgggtgatggtgtctagaaaggctcctgaaggtgtcacagtagatgacaattatgatcacaagcaggatattttggaatatgagtggtttgagtttactctaccggaagggaacttctcagccacaatgaccattgacctaatgaacaatgccatcattgataattaccttgaagtgggcagacagaatggagtgttggagagtgacattggtgttaaatttgacaccaggaactttagactgggttgggatccggaaactaagttgattatgcctggggtttacacctatgaggcattccatcctgacattgtattgttgcctggttgcggagttgactttactgaaagtcgccttagtaacttgcttggtatcaggaaaagacacccattccaggagggttttaagatcttgtatgaggatcttgaagggggtaatatcccggccctgttggatgtagaagcctataagaacagtaagaaagaacgagaagccaaaacagaagccgctaaagctgctgctattgctaaagccaacatagttgtcagcgaccctgtaagggtggctaatgccgaagaagtcagaggagacaactatacagcttcatctgttgcaactgaagaatcgctattggctgctgtggccgaaactacagagaccaaactcactattaaacctgtagaaaaagacagcaagagtagaagttacaatgtcttggaagataaagtgaatacagcctaccgcagctggtacctgtcctacaactatggtgaccctgaaaaaggagtccgttcctggacactgctcaccacctcggatgtcacctgtggagcagagcaggtgtactggtcgctcccagacatgatgcaggaccctgtcacattccgttccacgagacaagtcagcaactatccagtggtaggtgcagagctcatgccggtcttctcaaagagtttctacaacgagcaagccgtgtactcccagcagcttcgccagtccacctcgctcacgcacgtcttcaaccgcttccctgagaaccagatcctcatccgcccgccagcgcccaccattaccaccgtcagtgaaaacgttcctgctctcacagatcacgggaccctgccgttgcgcagcagtatccggggagtccagcgcgtgaccgttactgacgccagacgccgcacctgcccctacgtctacaaggccctgggcatagtcgcgccgcgcgtcctttcaagccgcactttctaa

SEQ ID NO: 169 - DNA, 1698 bp, Adenovirus B11
  MISC_FEATURE (1)..(1698): Penton Gene
gtgtctagtataatgaggcgagtcgtgctaggcggagcggtggtgtatccggagggtcctcctccttcgtacgagagcgtgatgcagcagcagcaggcgacggcggtgatgcaatccccactggaggctccctttgtgcctccgcgatacctggcacctacggagggcagaaacagcattcgttattcggaactggcacctcagtacgataccaccaggttgtatctggtggacaacaagtcggcggacattgcttctctgaactatcagaatgaccacagcaacttcttgaccacggtggtgcaaaacaatgactttacccctacggaagccagcacccagaccattaactttgatgaacgatcgcggtggggcggtcagctaaagaccatcatgcatactaacatgccaaacgtgaacgagtatatgtttagtaacaagttcaaagcgcgtgtgatggtgtccagaaaacctcccgacggtgctgcagttggggatacttatgatcacaagcaggatattttgaaatatgagtggttcgagtttactttgccagaaggcaacttttcagttactatgactattgatttgatgaacaatgccatcatagataattacttgaaagtgggtagacagaatggagtgcttgaaagtgacattggtgttaagttcgacaccaggaacttcaagctgggatgggatcccgaaaccaagttgatcatgcctggagtgtatacgtatgaagccttccatcctgacattgtcttactgcctggctgcggagtggattttaccgagagtcgtttgagcaaccttcttggtatcagaaaaaaacagccatttcaagagggttttaagattttgtatgaagatttagaaggtggtaatattccggccctcttggatgtagatgcctatgagaacagtaagaaagaacaaaaagccaaaatagaagctgctacagctgctgcagaagctaaggcaaacatagttgccagcgactctacaagggttgctaacgctggagaggtcagaggagacaattttgcgccaacacctgttccgactgcagaatcattattggccgatgtgtctgaaggaacggacgtgaaactcactattcaacctgtagaaaaagatagtaagaatagaagctataatgtgttggaagacaaaatcaacacagcctatcgcagttggtatctttcgtacaattatggcgatcccgaaaaaggagtgcgttcctggacattgctcaccacctcagatgtcacctgcggagcagagcaggtctactggtcgcttccagacatgatgaaggatcctgtcactttccgctccactagacaagtcagtaactaccctgtggtgggtgcagagcttatgcccgtcttctcaaagagcttctacaacgaacaagctgtgtactcccagcagctccgccagtccacctcgcttacgcacgtcttcaaccgctttcctgagaaccagattttaatccgtccgccggcgcccaccattaccaccgtcagtgaaaacgttcctgctctcacagatcacgggaccctgccgttgcgcagcagtatccggggagtccaacgtgtgaccgttactgacgccagacgccgcacctgtccctacgtgtacaaggcactgggcatagtcgcaccgcgcgtcctttcaagccgcactttctaa

SEQ ID NO: 170 - DNA, 1608 bp, Adenovirus B14a
  MISC_FEATURE (1)..(1608): Penton Gene
atgcagcagcagcaggcgacggcggtgatgcaatccccactggaggctccctttgtacctccgcgatacctggcacctacggagggcagaaacagcattcgttactcggaactggcacctcagtacgataccaccaggttgtatctggtggacaacaagtcggcggacattgcttctctgaactatcagaatgaccacagcaacttcttgaccacggtggtgcagaacaatgactttacccctacggaagccagtacccagaccattaactttgatgaacgatcgcggtggggcggtcagctaaagaccatcatgcatactaacatgcccaacgtaaacgagtatatgtttagtaacaacttcaaagcgcgtgtgatggtgtccagaaaacctcccgaaggtgctgcagttggggatacatatgatcacaagcaggatattttggaatatgagtggttcgagtttactttgccagaaggcaacttttcagttactatgaccattgatttgatgaacaatgccatcatagataactacttgaaagtgggcagacagaatggagtgcttgaaagtgacattggtgttaagttcgacaccaggaacttcaagctgggatgggatcccgaaaccaagttgattatgcctggagtgtatacgtatgaagcctttcatcctgacattgtcttactgcctggctgtggagtggactttaccgaaagtcgtttgagcaaccttcttggtatcagaaaaaaacagccatttcaagagggttttaagattttgtatgaagatttagaaggaggtaatattccggccctcttggatgtagatgcctatgagaacagtaagaaagaacaaaaagccaaaatagaagctgctgcggaagctaaggcaaacatagttgccagcgactctacaagggttgctaacgctggagaggtcagaggagacaattttgcaccaacacctgttccgactgcagaatcattattggccgatgtaactggaggaacggacgtgaaactcactattcaacctgtagaaaaagatagtaagaatagaagctataatgtgttggaagataaaatcaacacagcctatcgcagttggtacctttcgtacaattatggcgatcccgaaaaaggagtgcgttcctggacattgctcaccacctcagatgtcacctgcggagcagagcaggtctactggtcgcttccagacatgatgcaggatcctgtcactttccgctccactagacaagtcagcaactaccctgtggtgggtgcagagcttatgcccgtcttctcaaagagcttctacaacgaacaagctgtgtactcccagcagctccgccagtccacctcgcttacgcacgtcttcaaccgctttcctgagaaccagattttaatccgtccgccggcgcccaccattaccaccgtcagtgaaaacgttcctgctctcacagatcacgggaccctgccgttgcgcagcagtatccggggagtccaacgtgtgaccgttactgacgccagacgccgcacctgtccctacgtgtacaaggcactgggcatagtcgcaccgcgcgtcctttcaagccgcactttctaa

SEQ ID NO: 171 - DNA, 1677 bp, Adenovirus B14b
  MISC_FEATURE (1)..(1677): Penton Gene
atgaggcgagtcgtgctaggcggagcggtggtgtatccggagggtcctcctccttcgtacgagagcgtgatgcagcagcagcaggcgacggcggtgatgcaatccccactggaggctccctttgtacctccgcgatacctggcacctacggagggcagaaacagcattcgttactcggaactggcacctcagtacgataccaccaggttgtatctggtggacaacaagtcggcggacattgcttctctgaactatcagaatgaccacagcaacttcttgaccacggtggtgcagaacaatgactttacccctacggaagccagtacccagaccattaactttgatgaacgatcgcggtggggcggtcagctaaagaccatcatgcatactaacatgcccaacgtaaacgagtatatgtttagtaacaacttcaaagcgcgtgtgatggtgtccagaaaacctcccgaaggtgctgcagttggggatacatatgatcacaagcaggatattttggaatatgagtggttcgagtttactttgccagaaggcaacttttcagttactatgaccattgatttgatgaacaatgccatcatagataactacttgaaagtgggcagacagaatggagtgcttgaaagtgacattggtgttaagttcgacaccaggaacttcaagctgggatgggatcccgaaaccaagttgattatgcctggagtgtatacgtatgaagcctttcatcctgacattgtcttactgcctggctgtggagtggactttaccgaaagtcgtttgagcaaccttcttggtatcagaaaaaaacagccatttcaagagggttttaagattttgtatgaagatttagaaggaggtaatattccggccctcttggatgtagatgcctatgagaacagtaagaaagaacaaaaagccaaaatagaagctgctgcggaagctaaggcaaacatagttgccagcgactctacaagggttgctaacgctggagaggtcagaggagacaattttgcaccaacacctgttccgactgcagaatcattattggccgatgtaactggaggaacggacgtgaaactcactattcaacctgtagaaaaagatagtaagaatagaagctataatgtgttggaagataaaatcaacacagcctatcgcagttggtacctttcgtacaattatggcgatcccgaaaaaggagtgcgttcctggacattgctcaccacctcagatgtcacctgcggagcagagcaggtctactggtcgcttccagacatgatgcaggatcctgtcactttccgctccactagacaagtcagcaactaccctgtggtgggtgcagagcttatgcccgtcttctcaaagagcttctacaacgaacaagctgtgtactcccagcagctccgccagtccacctcgcttacgcacgtcttcaaccgctttcctgagaaccagattttaatccgtccgccggcgcccaccattaccaccgtcagtgaaaacgttcctgctctcacagatcacgggaccctgccgttgcgcagcagtatccggggagtccaacgtgtgaccgttactgacgccagacgccgcacctgtccctacgtgtacaaggcactgggcatagtcgcaccgcgcgtcctttcaagccgcactttctaa

SEQ ID NO: 172 - DNA, 1677 bp, Adenovirus B34
  MISC_FEATURE (1)..(1677): Penton Gene
atgaggcgagtcgtgctaggcggagcggtggtgtatccggagggtcctcctccttcgtacgagagcgtgatgcagcagcagcaggcgacggcggtgatgcaatccccactggaggctccctttgtgcctccgcgatacctggcacctacggagggcagaaacagcattcgttactcggaactggcacctcagtacgataccaccaggttgtatctggtggacaacaagtcggcggacattgcttctctgaactatcagaatgaccacagcaacttcttgaccacggtggtgcaaaacaatgactttacccctacggaagccagcacccagaccattaactttgatgaacgatcgcggtggggcggtcagctaaaaaccatcatgcatactaacatgcccaacgtgaacgagtatatgtttagtaacaagttcaaagcgcgtgtgatggtgtccagaaaacctcctgagggtgttagagtagacgataattatgatcataagcaagatattctaaaatacgagtggttcgagtttactttgccagaaggcaacttttcggtcactatgactatcgacttgatgaacaatgccatcatagacaattacttgaaagtgggcagacagaatggagtgttggaaagtgacattggtgttaagttcgacactaggaacttcaagttgggatgggatccagaaactaagttgatcatgcctggggtttacacctatgaggccttccatcctgacatcgtattgctgcctggctgcggagtggactttaccgaaagccgtctgagcaaccttcttggcattagaaagaaacacccattccaagagggttttaagatcttgtatgaggatttagaaggaggaaatattccagcccttttggatgtagatgcttatgagaacagcaagaaagatcaaaaagccaaaatagaagctgctgcagaagctaaagcaaacatagttgccaacgatccggtaagggtggctaacgctagtgaaatcaggggagacagttttgccgcaacatccgttccgactaaagaatcattattggatgatgtgtctcaaaacatagagttaaaactcactattaagcctgtggaaaaagatggcaaaaacagaagttacaatgtgttggaagataaaatcaacacggcctatcgcagttggtacctttcgtacaattatggcgaccccgaaaaaggagtgcgttcctggacattgctcaccacctcagatgtcacctgcggagcggagcaggtctactggtcgcttccagacatgatgcaggatcctgtcactttccgctccactagacaagtcagtaactaccctgtggtgggtgcagagcttatgcccgtcttttcaaagagcttctacaacgaacaagctgtgtactcccagcagctccgccagtccacctcgcttacgcacgtcttcaaccgctttcctgagaaccagattttaatccgtccgccggcgcccacaattaccaccgtcagtgaaaacgttcctgctctcacagatcacgggaccctgccgttgcgcagcagtatccggggagtccaacgtgtgaccgttactgacgccagacgccgcacctgtccctacgtgtacaaggcactgggcatagtcgcaccgcgcgtcctttcaagccgcactttctaa

SEQ ID NO: 173 - DNA, 1698 bp, Adenovirus B35
  MISC_FEATURE (1)..(1698): Penton Gene
gtgtctagtataatgaggcgagtcgtgctaggcggagcggtggtgtatccggagggtcctcctccttcgtacgagagcgtgatgcagcagcagcaggcgacggcggtgatgcaatccccactggaggctccctttgtgcctccgcgatacctggcacctacggagggcagaaacagcattcgttactcggaactggcacctcagtacgataccaccaggttgtatctggtggacaacaagtcggcggacattgcttctctgaactatcagaatgaccacagcaacttcttgaccacggtggtgcagaacaatgactttacccctacggaagccagcacccagaccattaactttgatgaacgatcgcggtggggcggtcagctaaagaccatcatgcatactaacatgccaaacgtgaacgagtatatgtttagtaacaagttcaaagcgcgtgtgatggtgtccagaaaacctcccgacggtgctgcagttggggatacttatgatcacaagcaggatattttggaatatgagtggttcgagtttactttgccagaaggcaacttttcagttactatgactattgatttgatgaacaatgccatcatagataattacttgaaagtgggtagacagaatggagtgcttgaaagtgacattggtgttaagttcgacaccaggaacttcaagctgggatgggatcccgaaaccaagttgatcatgcctggagtgtatacgtatgaagccttccatcctgacattgtcttactgcctggctgcggagtggattttaccgagagtcgtttgagcaaccttcttggtatcagaaaaaaacagccatttcaagagggttttaagattttgtatgaagatttagaaggtggtaatattccggccctcttggatgtagatgcctatgagaacagtaagaaagaacaaaaagccaaaatagaagctgctacagctgctgcagaagctaaggcaaacatagttgccagcgactctacaagggttgctaacgctggagaggtcagaggagacaattttgcgccaacacctgttccgactgcagaatcattattggccgatgtgtctgaaggaacggacgtgaaactcactattcaacctgtagaaaaagatagtaagaatagaagctataatgtgttggaagacaaaatcaacacagcctatcgcagttggtatctttcgtacaattatggcgatcccgaaaaaggagtgcgttcctggacattgctcaccacctcagatgtcacctgcggagcagagcaggtttactggtcgcttccagacatgatgaaggatcctgtcactttccgctccactagacaagtcagtaactaccctgtggtgggtgcagagcttatgcccgtcttctcaaagagcttctacaacgaacaagctgtgtactcccagcagctccgccagtccacctcgcttacgcacgtcttcaaccgctttcctgagaaccagattttaatccgtccgccggcgcccaccattaccaccgtcagtgaaaacgttcctgctctcacagatcacgggaccctgccgttgcgcagcagtatccggggagtccaacgtgtgaccgttactgacgccagacgccgcacctgtccctacgtgtacaaggcactgggcatagtcgcaccgcgcgtcctttcaagccgcactttctaa

SEQ ID NO: 174 - DNA, 1725 bp, Adenovirus C1
  MISC_FEATURE (1)..(1725): Penton Gene
atgcggcgcgcggcgatgtatgaggaaggtcctcctccctcctacgagagcgtggtgagcgcggcgccagtggcggcggcgctgggttcccccttcgatgctcccctggacccgccgttcgtgcctccgcggtacctgcggcctaccggggggagaaacagcatccgttactctgagttggcacccctattcgacaccacccgtgtgtaccttgtggacaacaagtcaacggatgtggcatccctgaactaccagaacgaccacagcaactttctaaccacggtcattcaaaacaatgactacagcccgggggaggcaagcacacagaccatcaatcttgacgaccggtcgcactggggcggcgacctgaaaaccatcctgcataccaacatgccaaatgtgaacgagttcatgtttaccaataagtttaaggcgcgggtgatggtgtcgcgctcgcttactaaggacaaacaggtggagctgaaatatgagtgggtggagttcacgctgcccgagggcaactactccgagacaatgaccatagaccttatgaacaacgcgatcgtggagcactacttgaaagtgggcaggcagaacggggttctggaaagcgacatcggggtaaagtttgacacccgcaacttcagactggggtttgacccagtcactggtcttgtcatgcctggggtatatacaaacgaagccttccatccagacatcattttgctgccaggatgcggggtggacttcacccacagccgcctgagcaacttgttgggcatccgcaagcggcaacccttccaggagggctttaggatcacctacgatgacctggagggtggtaacattcccgcactgttggatgtggacgcctaccaggcaagcttgaaagatgacaccgaacagggcgggggtggcgcaggcggcggcaacaacagtggcagcggcgcggaagagaactccaacgcggcagccgcggcaatgcagccggtggaggacatgaacgatcatgccattcgcggcgacacctttgccacacgggcggaggagaagcgcgctgaggccgaggcagcggccgaagctgccgcccccgctgcggaggctgcacaacccgaggtcgagaagcctcagaagaaaccggtgattaaacccctgacagaggacagcaagaaacgcagttacaacctaataagtaatgacagcaccttcacccagtaccgcagctggtaccttgcatacaactacggcgaccctcaggccgggatccgctcatggaccctgctttgcactcctgacgtaacctgcggctcggagcaggtatactggtcgttgcccgacatgatgcaagaccccgtgaccttccgctccacgagccagatcagcaactttccggtggtgggcgccgagctgttgcccgtgcactccaagagcttctacaacgaccaggccgtctactcccagctcatccgccagtttacctctctgacccacgtgttcaatcgctttcccgagaaccagattttggcgcgcccgccagcccccaccatcaccaccgtcagtgaaaacgttcctgctctcacagatcacgggacgctaccgctgcgcaacagcatcggaggagtccagcgagtgaccattactgacgccagacgccgcacctgcccctacgtttacaaggccctgggcatagtctcgccgcgcgtcctatcgagccgcactttttga

SEQ ID NO: 175 - DNA, 1716 bp, Adenovirus C2
  MISC_FEATURE (1)..(1716): Penton Gene
atgcagcgcgcggcgatgtatgaggaaggtcctcctccctcctacgagagcgtggtgagcgcggcgccagtggcggcggcgctgggttcccccttcgatgctcccctggacccgccgtttgtgcctccgcggtacctgcggcctaccggggggagaaacagcatccgttactctgagttggcacccctattcgacaccacccgtgtgtaccttgtggacaacaagtcaacggatgtggcatccctgaactaccagaacgaccacagcaactttctaaccacggtcattcaaaacaatgactacagcccgggggaggcaagcacacagaccatcaatcttgacgaccgttcgcactggggcggcgacctgaaaaccatcctgcataccaacatgccaaatgtgaacgagttcatgtttaccaataagtttaaggcgcgggtgatggtgtcgcgctcgcttactaaggacaaacaggtggagctgaaatatgagtgggtggagttcacgctgcccgagggcaactactccgagaccatgaccatagaccttatgaacaacgcgatcgtggagcactacttgaaagtgggcaggcagaacggggttctggaaagcgacatcggggtaaagtttgacacccgcaacttcagactggggtttgacccagtcactggtcttgtcatgcctggggtatatacaaacgaagccttccatccagacatcattttgctgccaggatgcggggtggacttcacccacagccgcctgagcaacttgttgggcatccgcaagcggcaacccttccaggagggctttaggatcacctacgatgacctggagggtggtaacattcccgcactgttggatgtggacgcctaccaggcaagcttaaaagatgacaccgaacagggcggggatggcgcaggcggcggcaacaacagtggcagcggcgcggaagagaactccaacgcggcagccgcggcaatgcagccggtggaggacatgaacgatcatgccattcgcggcgacacctttgccacacgggcggaggagaagcgcgctgaggccgaggcagcggcagaagctgccgcccccgctgcgcaacccgaggtcgagaagcctcagaagaaaccggtgatcaaacccctgacagaggacagcaagaaacgcagttacaacctaataagcaatgacagcaccttcacccagtaccgcagctggtaccttgcatacaactacggcgaccctcagaccgggatccgctcatggaccctcctttgcactcctgacgtaacctgcggctcggagcaggtctactggtcgttgccagacatgatgcaagaccccgtgaccttccgctccacgagccagatcagcaactttccggtggtgggcgccgagctgttgcccgtgcactccaagagcttctacaacgaccaggccgtctactcccagctcatccgccagtttacctctctgacccacgtgttcaatcgctttcccgagaaccagattttggcgcgcccgccagcccccaccatcaccaccgtcagtgaaaacgttcctgctctcacagatcacgggacgctaccgctgcgcaacagcatcggaggagtccagcgagtgaccattactgacgccagacgccgcacctgcccctacgtttacaaggccctgggcatagtctcgccgcgcgtcctatcgagccgcactttttga

SEQ ID NO: 176 - DNA, 1470 bp, Adenovirus D8
  MISC_FEATURE (1)..(1470): Penton Gene
atggctcctacggagggcagaaacagcattcgttactcggagctggctccgcagtacgacaccactcgcgtgtacttggtggacaacaagtcggcggacatcgcttccctcaactaccaaaacgaccacagcaacttcctaaccacggtggtgcagaacaacgatttcacccccgccgaggccagcacgcagacgataaattttgacgagcggtcccggtggggcggtgatctgaagaccattttgcacaccaacatgcccaatgtgaacgagtacatgttcaccagcaagtttaaggcgcgggtgatggtggctaggaagcacccacagggggtagctgaaacagatttaagtcaggataagcttgaatatgagtggtttgagtttaccctgcccgagggcaatttttccgagaccatgaccatagacctgatgaacaacgccatcttggaaaactacttgcaagtggggcggcaaaatggcgtgctggagagcgatattggagttaagtttgacagcagaaatttcaagctgggctgggacccggtgactaagctggtgatgccgggggtctacacatacgaggccttccatcccgacgtggtgctgctgccgggctgcggggtggacttcaccgagagccgcctgagcaaccttctgggcattcgcaagaagcaacctttccaagagggcttcaggattatgtatgaggatctagaagggggcaacatccccgccctgctggatgtggaagcatacctcaaaagcaagaatgatcgggaggaagccacccagaatgcaaacagagttgctgcaaatggaggtggtgaaattaggggagatacttttcttaccaccgaacagctaagagccgctgacaaggagctggttattaagcccattaaggaagatgctagcaagagaagctataatgtcataggggacacccatgacaccctgtaccgcagctggtacctgtcctatacctacggggaccccgagaagggggtacagtcgtggacgctgctcaccaccccggacgtcacctgcggcgcggagcaagtctactggtcgctgccggacctcatgcaagaccccgtcaccttccgctccacccagcaagtcagcaactaccccgtggttggcgccgagctcatgcccttccgcgccaagagcttttacaacgatctcgccgtctactcccagctcatccgcagctacacctccctcacccacgtcttcaaccgcttccccgacaaccagatcctgtgtcgcccgcccgcgcccaccatcaccaccgttagtgaaaacgtgcctgctctcacagatcacgggacgctaccgctgcgcagcagtatccgcggagtccagcgagtgaccgttactgacgcccgtcgccgcacctgtccctacgtctacaaggccctgggcatagtcgcgccgcgcgtgctctctagtcgcaccttttaa

SEQ ID NO: 177 - DNA, 1560 bp, Adenovirus D9
  MISC_FEATURE (1)..(1560): Penton Gene
atgaggcgtgcggtggtgtcttcctctcctcctccctcgtacgagagcgtgatggcgcaggcgaccctggaggttccgtttgtgcctccgcggtatatggctcctacggagggcagaaacagcattcgttactcggagctggctccgcagtacgacaccactcgcgtgtacttggtggacaacaagtcggcggacatcgcttccctgaactaccaaaacgaccacagcaacttcctgaccacggtggtgcagaacaacgatttcacccccgccgaggccagcacgcagacgataaattttgacgagcggtcgcggtggggcggtgatctgaagaccattctgcacactaacatgcccaatgtgaacgagtacatgttcaccagcaagtttaaggcgcgggtgatggtggctaggaagcatccagagggggtagttgaaacagatttgagtcaggataagcttgaatatgagtggtttgagtttaccctgcccgagggaaacttttccgagaccatgaccatagacctgatgaacaacgccatcttggaaaactacttgcaagtggggcggcaaaatggcgtgctggagagcgatatcggagtcaagtttgacagcagaaatttcaagctgggctgggacccggtgaccaagctggtgatgccaggggtctacacctacgaggccttccacccggacgtggtgctgctgccgggctgcggggtggacttcaccgagagccgcctgagcaacctcctgggcattcgcaagaagcaacctttccaagagggcttcagaatcatgtatgaggatctagaaggtggcaacatccccgccctccttgatgtgcccaagtacttggaaagcaagaagaaagttgaagacgaaactaaaaatgcagctgcggctacagccgatacaaccactaggggtgatacatttggaactccagcgcaagagacagcagctgataagaaggtagaagtcttgcccattgaaaaggatgagagtggtagaagttacaacctgatccaggggacccacgacacgctgtaccgcagttggtacctgtcctatacctacggggaccccgagaagggggtgcagtcgtggacgctgctcaccaccccggacgtcacctgcggcgcggagcaagtctactggtcgctgccggacctcatgcaagacccagtcaccttccgctctacccagcaagtcagcaactaccccgtggtcggcgccgagctcatgcccttccgcgccaagagcttttacaacgacctcgccgtctactcccagctcatccgcagctacacctccctcacccacgtcttcaaccgcttccccgacaaccagatcctctgccgcccgcccgcgcccaccatcaccaccgtcagtgaaaacgtgcctgctctcacagatcacgggacgctaccgctgcgcagcagtatccgcggagtccagcgagtgaccgtcactgacgcccgtcgccgcacctgtccctacgtctacaaggccctgggcatagtcgcgccgcgcgtgctttccagtcgcaccttctaa

SEQ ID NO: 178 - DNA, 1560 bp, Adenovirus D10
  MISC_FEATURE (1)..(1560): Penton Gene
atgaggcgtgcggtggtgtcttcctctcctcctccctcgtacgagagcgtgatggcgcaggcgaccctggaggttccgtttgtgcctccgcggtatatggctcctacggagggcagaaacagcattcgttactcggagctggctccgcagtacgacaccactcgcgtgtacttggtggacaacaagtcggcggacatcgcttccctgaactaccaaaacgaccacagcaacttcctgaccacggtggtgcagaacaacgatttcacccccgccgaggccagcacgcagacgataaattttgacgagcggtcgcggtggggcggtgatctgaagaccattctgcacactaacatgcccaatgtgaacgagtacatgttcaccagcaagtttaaggcgcgggtgatggtggctaggaagcatccagagggggtagttgaaacagatttgagtcaggataagcttgaatatgagtggtttgagtttaccctgcccgagggaaacttttccgagaccatgaccatagacctgatgaacaacgccatcttggaaaactacttgcaagtggggcggcaaaatggcgtgctggagagcgatatcggagtcaagtttgacagcagaaatttcaagctgggctgggacccggtgaccaagctggtgatgccaggggtctacacctacgaggccttccacccggacgtggtgctgctgccgggctgcggggtggacttcaccgagagccgcctgagcaacctcctgggcattcgcaagaagcaacctttccaagagggcttcagaatcatgtatgaggatctagaaggtggcaacatccccgccctccttgatgtgcccaagtacttggaaagcaagaagaaagttgaagacgaaactaaaaatgcagctgcggccacagccgatacaaccactaggggtgatacatttgcaactccagcgcaagagacagcagctgataagaaggtagaagtcttgcccattgaaaaggatgagagtggtagaagttacaacctgatccaggggacccacgacacgctgtaccgcagttggtacctgtcctatacctacggggaccccgagaagggggtgcagtcgtggacgctgctcaccaccccggacgttacctgcggcgcggagcaagtctactggtcactgccggacctcatgcaagaccccgtcaccttccgctccacccagcaagtcagcaactaccccgtggtcggcgccgagctcatgcccttccgcgccaagagcttttacaacgacctcgccgtctactcccagctcatccgcagctacacctccctcacccacgtcttcaaccgcttccccgacaaccagatcctctgccgcccgcccgcgcccaccatcaccaccgtcagtgaaaacgtgcctgctctcacagatcacgggacgctaccgctgcgcagcagtatccgcggagtccagcgagtgaccgtcactgacgcccgtcgccgcacctgtccctacgtctacaaggccctgggcatagtcgcgccgcgcgtgctttccagtcgcaccttctaa

SEQ ID NO: 179 - DNA, 1554 bp, Adenovirus D13
  MISC_FEATURE (1)..(1554): Penton Gene
atgaggcgcgcggtggtgtctcctcctccctcgtacgagagcgtgatggcgcaggcgaccctggaggttccgtttgtgcctccgcggtatatggctcctacggagggcagaaacagcattcgttactcggagctggctccgcagtacgacaccactcgcgtgtacttggtggacaacaagtcggcggacatcgcttccctgaactaccaaaacgaccacagcaacttcctgaccacggtggtgcagaacaacgatttcacccccgccgaggccagcacgcagacgataaattttgacgagcggtcccggtggggcggtgatctgaagaccattctgcacaccaacatgcccaatgtgaacgagtacatgttcaccagcaagtttaaggcgcgggtgatggtggctaggaagcatccagagggggtagaagcaaccgatttaagcaaggatatcttagagtatgattggtttgagtttaccctgcccgagggcaacttttccgagaccatgaccatagacctgatgaacaacgccatcttggaaaactacttgcaagtggggcggcaaaatggcgtgctggagagcgatatcggagtcaagtttgacagcaggaatttcaagctgggctgggacccggtgaccaagctggtgatgccaggtgtctacacctacgaggccttccacccggacgtggtgctgctgccgggctgcggggtggacttcaccgagagccgcctgagcaacctcctgggcattcgcaagaagcaacctttccaagagggcttcagaatcatgtatgaggatctagtagggggcaatatcccagccctcctggatgtcaagaagtatctgaaggataaggaagaagctggcactacagatgcaaataccattaaggctcagaatgatgcagtcccaagaggagacaactttgcttcagcggcagatgccaaagcggcaggaaaagaaattgagttgaaagccattttaaaagatgattcaggcagaagctacaatgtgatcgagggaaccacggacaccctgtaccgaagttggtacctgtcctatacctacggggaccccgagaagggggtgcagacgtggacgctgctcactaccccggacgtcacctgcggcgcggagcaagtctactggtcgctgccggacctcatgcaagaccccgtcaccttccgctccacccagcaagtcagcaactaccccgtggtcggcgccgagctcatgcccttccgcgccaagagcttttacaacgacctcgccgtctactcccagctcatccgcagctacacctccctcacccacgtcttcaaccgcttccccgacaaccagatcctctgccgcccgcccgcgcccaccatcaccaccgtcagtgaaaacgtgcctgctctcacagatcacgggacgctaccgctgcgcagcagtatccgcggagtccagcgagtgaccgtcactgacgcccgtcgccgcacctgtccctacgtctacaaggccctgggcatagtcgcgccgcgcgtgctttccagtcgcaccttctaa

SEQ ID NO: 180 - DNA, 1458 bp, Adenovirus D17
  MISC_FEATURE (1)..(1458): Penton Gene
atggctcctacggagggcagaaacagcattcgttactcggagctggctccgttgtacgacaccactcgcgtgtacttggtggacaacaagtcggcggacatcgcttccctgaactatcaaaacgaccacagcaacttcctgaccacggtggtgcagaacaacgatttcacccccgccgaggctagcacgcagacgataaattttgacgagcggtcgcggtggggcggtgatctgaagaccattctgcacaccaacatgcccaatgtgaacgagtacatgttcaccagcaagtttaaggcgcgggtgatggtggctagaaaacacccacagggggtagaagcaacagatttaagcaaggatatcttagagtatgagtggtttgagtttaccctgcccgagggcaacttttccgagaccatgaccatagacctgatgaacaacgccatcttggaaaactacttgcaagtggggcggcaaaatggcgtgctggagagcgatattggagtcaagtttgacagcagaaatttcaagctgggctgggaccctgtgaccaagctggtgatgccaggggtctacacctacgaggcctttcacccggacgtggtgctgctgccgggctgcggggtggacttcacagagagccgcctgagcaacctcctgggcattcgcaagaagcaacctttccaagagggcttcagaatcatgtatgaggatctagaagggggcaacatccccgccctgctggatgtgcccaagtacttggaaagcaagaagaagttagaggaggcattggagaatgctgctaaagctaatggtcctgcaagaggagacagtagcgtctcaagagaggttgaaaaggcagctgaaaaagaacttgttattgagcccatcaagcaagatgatagcaagagaagttacaacctcatcgagggaaccatggacacgctgtaccgcagctggtacctgtcctatacctacggggaccctgagaagggggtgcagtcgtggacgctgctcaccaccccggacgtcacctgcggcgcggagcaagtctactggtcgctgccggacctcatgcaagaccccgtcaccttccgttctacccagcaagtcagcaactaccccgtggtcggcgccgagctcatgcccttccgcgccaagagcttttacaacgacctcgccgtctactcccagctcatccgcagctacacctccctcacccacgtcttcaaccgcttccccgacaaccagatcctctgccgtccgcccgcgcccaccatcaccaccgtcagtgaaaacgtgcctgctctcacagatcacgggacgctaccgctgcgcagcagtatccgcggagtccagcgagtgaccgtcactgacgcccgtcgccgcacctgtccctacgtctacaaggccctgggcatagtcgcgccgcgtgtgctttccagtcgcaccttctaa

SEQ ID NO: 181 - DNA, 1560 bp, Adenovirus D20
  MISC_FEATURE (1)..(1560): Penton Gene
atgaggcgtgcgatggtgtcttcctctcctcctccctcgtacgagagcgtgatggcgcaggcgaccctggaggttccgtttgtgcctccgcggtatatggctcctacggagggcagaaacagcattcgttactcggagctggctccgctgtacgacaccactcgcgtgtacttggtggacaacaagtcggcggacatcgcttccctgaactaccaaaacgaccacagcaacttcctgaccacggtggtgcagaacaacgatttcacccccgccgaggctagcacgcagacgataaattttgacgagcggtcgcggtggggcggtgatctgaagaccattctgcacaccaacatgcccaatgtgaacgagtacatgttcaccagcaagtttaaggcgcgggtgatggtggctaggaagcacccagatggtgtagacaaagatgatttaagcaaggatatcttagagtatgagtggtttgagtttaccctgcccgagggcaacttttccgagaccatgaccatagacctgatgaacaacgccatcttggaaaactacttgcaagtggggcggcaaaatggcgtgctggagagcgatattggagtcaagtttgacagcaggaatttcaagctgggctgggacccggtgaccaagctggtgatgccaggggtctacacctacgaggccttccacccggacgtggtgctgctgccgggctgcggggtggacttcaccgagagccgcctgagcaacctcctgggcattcgcaagaagcaacctttccaagagggcttcagaatcatgtatgaggatctagtagggggcaacatccccgccctcctgaatgtcaaggagtatctgaaggataaggaagaagctggcacagcagatgcaaataccattaaggctcagaatgatgcagtcccaagaggagataactatgcatcagcggcagaagccaaagcagcaggaaaagaaattgagttgaaggccattttgaaagatgattcaaacagaagctacaatgtgatcgagggaaccacagacaccctgtaccgcagttggtacctgtcctatacctacggggaccccgagaagggggtgcagtcgtggacgctgctcaccaccccggacgtcacctgcggcgcggagcaagtctactggtcgctgccggacctcatgcaagaccccgtcaccttccgctctacccagcaagtcagcaactaccccgtggttggcgccgagctcatgcccttccgcgccaagagcttttacaacgacctcgccgtctactcccagctcatccgcagctacacctccctcacccacgtcttcaaccgcttccccgacaaccagatcctctgccgcccgcccgcgcccaccatcaccaccgtcagtgaaaacgtgcctgctctcacagatcacgggacgcttccgctgcgcagcagtatccgcggagtccagcgagtgaccgtcactgacgcccgtcgccgcacctgtccctacgtctacaaggccctgggcatagtcgcgccgcgcgtgctatccagtcgcaccttctaa

SEQ ID NO: 182 - DNA, 1545 bp, Adenovirus D24
  MISC_FEATURE (1)..(1545): Penton Gene
atgaggcgcgcggtggtgtcttcctctcctcctccctcgtacgagagcgtgatggcgcaggcaaccctggaggttccgtttgtgcctccgcggtatatggctcctacggagggcagaaacagcattcgttactcggaactggctccgcagtacgacaccactcgcgtgtacttggtggacaacaagtcggcggacatcgcttccctgaactaccaaaacgaccacagcaacttcctgaccacggtggtgcagaacaacgatttcacccccgccgaggccagcacgcagacgataaattttgacgagcggtcgcggtggggcggtgatttgaagaccattctgcacaccaacatgcccaatgtgaacgagtacatgttcaccagcaagtttaaggcgcgggtgatggtggctaggaaggtggtagatcagaatgataggagcaaggatgagttaaaatatgagtggtttgagtttaccctgcccgagggcaacttttccgagaccatgaccatagacctgatgaacaacgccatcttggaaaactacttgcaagtggggcggcaaaatggcgtgctggagagcgatatcggagtcaagtttgacagcaggaatttcaagctgggctgggacccggtaaccaagctggtgatgcctggggtctacacctacgaggccttccacccggacgttgtgctgctgccgggctgcggggtggacttcaccgagagccgcctgagcaacctcctgggcattcgcaagaagcaacctttccaagagggcttcaggatcatgtatgaggatctcgagggtggtaacatccccgccctcctggatgtcaagcaatatttggatagtaaaaagaagcttgaggaggcaacacagaatgcaaccagggctgctggagatatcagaggagacagtcatattccaagagctgtggaacaagcggctgaaaaggatctggtcattgtaccagtaacacaagatgaaagtaagagaagctataatgtcatagatggcacccatgacaccctctaccgaagttggtacctgtcctatacctacggggaccccgagaagggggtgcagtcgtggacgctgctcaccaccccggacgtcacctgcggcgcggagcaagtctactggtcgctgccggacctcatgcaagaccccgtcaccttccgctctacccagcaagtcagcaactaccccgtggttggcgccgagctcatgcccttccgcgccaagagcttttacaacgacctcgccgtctactcccagctcatccgcagctacacctccctcacccacgtcttcaaccgcttccccgacaaccagatcctctgccgtccgcccgcgcccaccatcaccacggtcagtgaaaacgtgcctgctctcacagatcacgggacgctaccgctgcgcagcagtatccgcggagtccagcgagtgaccgtcactgacgcccgtcgccgcacctgtccctacgtctacaaggccctgggcatagtcgcgccgcgcgtgctttccagtcgcaccttctaa

SEQ ID NO: 183 - DNA, 1512 bp, Adenovirus D25
  MISC_FEATURE (1)..(1512): Penton Gene
atggcgcaggcgaccctggaggttccgtttgtgcctccgcggtatatggctcctacggagggcagaaacagcattcgttactcggagctggctccgcagtacgacaccactcgcgtgtacttggtggacaacaagtcggcggacatcgcttccctgaactaccaaaacgaccacagcaacttcctgaccacggtggtgcagaacaacgatttcacccccgccgaggccagcacgcagacgataaattttgacgagcggtcgcggtggggcggtgatctgaagacgattctgcacaccaacatgcccaatgtgaacgagtacatgttcaccagcaagtttaaggcgcgggtgatggtggctagaaagcacccagagaatgtagacaaaacagatttgagtcaggataagcttgaatatgaatggtttgagtttaccctgcccgagggcaacttttccgagaccatgaccatagacctgatgaacaacgccatcttggaaaactacttgcaagtggggcggcaaaatggcgtgctggagagcgatatcggagtcaagtttgacagcaggaatttcaagctgggctgggacccggtgaccaagctggtgatgccaggggtctacacctacgaggcctttcacccggacgtggtgctgctgccgggctgcggggtggacttcacagagagccgcctgagcaacctcctgggcattcgcaagaagcaacctttccaagagggcttcagaatcatgtatgaggatctagaagggggtaacatccccgctctcctggataccaaaaaatatctggatagcaagaaggaacttgaggatgctgccaaggaagctgcaaagcaacagggagatggtgctgtcactagaggcgatacccacctcactgtagctcaagaaaaagcagctgaaaaggagctagtgatcgtaccaattgaaaaggatgagagcaacagaagttacaacctgatcaaggacacccatgacaccatgtaccgaagctggtacctgtcctatacctacggggaccccgagaagggggtgcagtcgtggacgctgctcaccactccggacgtcacctgcggcgcggagcaagtctactggtcgctgccggacctcatgcaagaccccgtcaccttccgctccacccagcaagtcagcaactaccccgtggtcggcgccgagctcatgcccttccgcgccaagagcttttacaacgacctcgccgtctactcccagctcatccgcagctacacctccctcacccacgtcttcaaccgcttccccgacaaccagatcctctgccgcccgcccgcgcccactatcaccaccgtcagtgaaaacgtgcctgctctcacagatcacgggacgctaccgctgcgcagcagtatccgcggagtccagcgagtgaccgtcactgacgcccgtcgccgcacctgtccctacgtctacaaggccctgggcatagtcgcgccgcgtgtgctttccagtcgcaccttctaa

SEQ ID NO: 184 - DNA, 1560 bp, Adenovirus D26
  MISC_FEATURE (1)..(1560): Penton Gene
atgaggcgcgcggtggtgtcttcctctcctcctccctcgtacgagagcgtgatggcgcaggcgaccctggaggttccgtttgtgcctccgcggtatatggctcctacggagggcagaaacagcattcgttactcggagctggctccgcagtacgacaccactcgcgtgtacttggtggacaacaagtcggcggacatcgcttccctgaactaccaaaacgaccacagcaacttcctgaccacggtggtgcagaacaacgatttcacccccgccgaggccagcacgcagacgataaattttgacgagcggtcgcggtggggcggtgatctgaagaccattctgcacactaacatgcccaatgtgaacgagtacatgttcaccagcaagtttaaggcgcgggtgatggtgtctaggaagcatccagagggggtagttgaaacagatttgagtcaggataagcttgaatatgagtggtttgagtttaccctgcccgagggaaacttttccgagaccatgaccatagacctgatgaacaacgccatcttggaaaactacttgcaagtggggcggcagaatggcgtgctggagagcgatatcggagtcaagtttgacagcagaaatttcaagctgggctgggacccggtgaccaagctggtgatgccaggggtctacacctacgaggccttccacccggacgtggtgctgctgccgggctgcggggtggacttcaccgagagccgcctgagcaacctcctgggcattcgcaagaagcaacctttccaagagggcttcagaatcatgtatgaggatctagaaggtggcaacatccccgccctccttgatgtgcccaagtacttggaaagcaagaagaaagttgaagacgaaactaaaaatgcagctgcggccacagccgatacaaccactaggggtgatacatttgcaactccagcgcaagagacagcagctgataagaaggtagaagtcttgcccattgaaaaggatgagagcggtagaagttacaacctgatccaggggacccacgacacgctgtaccgcagttggtacctgtcctatacctacggggaccccgagaagggggtgcagtcgtggacgctgctcaccaccccggacgttacctgcggcgcggagcaagtctactggtcactgccggacctcatgcaagaccccgtcaccttccgctccacccagcaagtcagcaactaccccgtggtcggcgccgagctcatgcccttccgcgccaagagcttttacaacgacctcgccgtctactcccagctcatccgcagctacacctccctcacccacgtcttcaaccgcttccccgacaaccagatcctctgccgcccgcccgcgcccaccatcaccaccgtcagtgaaaacgtgcctgctctcacagatcacgggacgctaccgctgcgcagcagtatccgcggagtccagcgagtgaccgtcactgacgcccgtcgccgcacctgtccctacgtctacaaggccctgggcatagtcgcgccgcgcgtgctttccagtcgcaccttctaa

SEQ ID NO: 185 - DNA, 1545 bp, Adenovirus D27
  MISC_FEATURE (1)..(1545): Penton Gene
atgaggcgcgcggtggtgtcttcctctcctcctccctcgtacgagagcgtgatggcgcaggcgaccctggaggttccgtttgtgcctccgcggtatatggctcctacggagggcagaaacagcattcgttactcggagctggctccgcagtacgacaccactcgcgtgtacttggtggacaacaagtcggcggacatcgcttccctgaactaccaaaacgaccacagcaacttcctgaccacggtggtgcagaacaacgatttcaccccagccgaggccagcacgcagacgataaattttgacgagcggtcgcggtggggcggtgatctgaagaccattctgcacaccaacatgcccaatgtgaacgagtacatgttcaccagcaagtttaaggcgcgggtgatggtggctaggaaggtggtagatcagaatgataggagcaaggatgagttaaaatatgagtggtttgagtttaccctgcccgagggcaacttttccgagaccatgaccatagacctgatgaacaacgccatcttggaaaactacttacaagtggggcgacagaatggcgtgctggagagcgatatcggagtcaagtttgacagtaggaatttcaagctgggctgggacccggtgaccaagctggtgatgccaggggtctacacctacgaggcctttcacccggacgtggtgctgctgcctggctgcggggtggacttcaccgagagccgcctgagcaaccttctgggcattcgcaagaagcaacctttccaagagggcttcaggatcatgtatgaggatctcgagggtggtaacatccccgccctcctggatgtcaagcaatatttggatagtaaaaagaagcttgaggaggcaacacaaaatgcaaccagggctgctggagatatcagaggagacagtcatattccaagagctgtggaacaagcggctgaaaaggatctggtcattgtaccagtaacacaagatgaaagcaaaagaagctataatgtcatagatggcacccatgacaccctgtaccgaagttggtacctgtcctatacctacggggaccccgagaagggggtgcagtcgtggacgctgctcaccaccccggacgttacctgcggcgcggagcaagtctactggtcgctgccggacctcatgcaagaccccgtcaccttccgctctacccagcaagtcagcaactaccccgtggtcggcgccgagctcatgcccttccgcgccaagagcttttacaacgacctcgccgtctactcccagctcatccgcagctacacctccctcacccacgtcttcaaccgcttccctgacaaccagatcctctgccgcccgcccgcgcccaccatcaccaccgtcagtgaaaacgtgcctgctctcacagatcacgggacgctaccgctgcgcagcagtatccgcggagtccagcgagtgaccgtcactgacgcccgtcgccgcacctgtccctacgtctacaaggccctgggcatagtcgcgccgcgcgtgctttccagtcgcaccttctaa

SEQ ID NO: 186 - DNA, 1554 bp, Adenovirus D33
  MISC_FEATURE (1)..(1554): Penton Gene
atgaggcgtgcggtggtgtcttcctctcctcctccctcgtacgagagcgtgatggcgcaggcgaccctggaggttccgtttgtgcctccgcggtatatggctcctacggagggcagaaacagcattcgttactcggagctggctccgctgtacgacaccactcgcgtgtatttggtggacaacaagtcggcggacatcgcttccctgaactaccaaaacgaccacagcaacttcctgaccacggtggtgcagaacaacgatttcacccccgccgaggccagcacgcagacgataaattttgacgagcggtcgcggtggggcggtgatctgaagaccattctgcacaccaacatgcccaatgtgaacgagtacatgttcaccagcaagtttaaggcgcgggtgatggtggctagaaagcatcccaaagatgtagatgcaagtgatttaagcaaggatatcttagagtatgattggtttgagtttaccctgcccgagggcaacttttccgagaccatgaccatagacctgatgaacaacgccatcttggaaaactacttgcaagtggggcggcaaaatggcgtgctggagagcgatatcggagtcaagtttgacagcaggaatttcaagctgggctgggacccggtgaccaagctggtgatgccaggggtctacacctacgaggccttccacccggacgtggtgctgctgccgggctgcggggtggacttcaccgagagccgcctgagcaacctcctgggcattcgcaagaagcaacctttccaagagggcttcagaatcatgtatgaggatctagaaggcggtaacatccccgctctcctggataccaaaaaatatctggatagcaagaaagaaattgaagatgcaaaacagaaagcggcccaggcaggtggcgagatcagaggagacagtgctgatactagagctgcagaacaggcgactgaaaaagagctggttattgaacccatcgagcaagatgaaagcaagagaagctataatgtgatcaagggtacccatgacaccctgtaccgaagttggtacctgtcctatacctacggggaccccgagaagggggtgcagtcgtggacgctgctcaccaccccggacgtcacctgcggcgcggagcaagtctactggtcgctgccggacctcatgcaagaccccgtcaccttccgttctacccagcaagtcagcaactaccccgtggtcggcgccgagctcatgcccttccgcgccaagagcttttacaacgacctcgccgtctactcccagctcatccgcagctatacctccctcacctacgtcttcaaccgcttccccgacaaccagatcctatgccgcccgcccgcgcccaccatcaccaccgtcagtgaaaacgtgcctgctctcacagatcacgggacgcttccgctgcgcagcagtatccgcggagtccagcgagtgaccgtcactgacgcccgtcgccgcacctgtccctacgtctacaaggccctgggcatagtcgcgccgcgcgtgctctccagtcgcaccttctaa

SEQ ID NO: 187 - DNA, 1560 bp, Adenovirus D37
  MISC_FEATURE (1)..(1560): Penton Gene
atgaggcgcgcggtggtgtcttcctctcctcctccctcgtacgagagcgtgatggcgcaggcgaccctggaggttccgtttgtgcctccgcggtatatggctcctacggagggcagaaacagcattcgttactcggagctggctccgctgtacgacaccactcgcgtgtatttggtggacaacaagtcggcggacatcgcttccctgaactaccaaaacgaccacagcaacttcctgaccacggtggtgcagaacaacgatttcacccctgccgaggccagcacgcagacgataaattttgacgagcggtcgcggtggggcggtgatctgaagaccattctgcacaccaacatgcctaatgtgaacgagtacatgttcaccagcaagtttaaggcgcgggtgatggtggctagaaaaaaggcggaaggggctgatgcaaatgataggagcaaggatatcttagagtatcagtggtttgagtttaccctgcccgagggcaacttttccgagaccatgaccatagacctaatgaacaacgccatcttggaaaactacttgcaagtggggcggcaaaatggcgtgctggagagtgatatcggagtcaagtttgacagcagaaatttcaagctgggctgggacccggtgaccaagctggtgatgccaggggtctacacctacgaggccttccacccggacgtggtgctgctgccgggctgcggggtggatttcaccgagagccgcctgagcaacctcctgggcattcgcaagaagcaaccttttcaagagggcttcagaatcatgtatgaggacctagtagggggcaacatccccgctctcctgaatgtcaaggagtatctgaaggataaggaagaagctggcaaagcagatgcaaatactattaaggctcagaatgatgccgtcccaagaggagataactatgcatcagcggcagaagccaaagcagcaggaaaagaaattgagttgaaggccattttgaaagatgattcagacagaagctacaatgtgatcgagggaaccacagacaccctgtaccgcagttggtacctgtcctatacctacggggatcccgagaagggggtgcagtcgtggacgctgctcaccaccccggacgtcacctgcggcgcggagcaagtctactggtcgctgccggacctcatgcaagaccccgtcaccttccgctctacccagcaagtcagcaactaccccgtggtcggcgccgagctcatgcccttccgcgccaagagcttttacaacgacctcgccgtctactcccagctcatccgcagctacacctccctcacccacgtcttcaaccgcttccccgacaaccagatcctttgccgcccgcccgcgcccaccatcaccaccgtcagtgaaaacgtgcctgctctcacagatcacgggacgctaccgctgcgcagcagtatccgcggagtccagcgagtgaccgtcactgacgcccgtcgccgcacctgtccctacgtctacaaggccctgggcatagtcgcgccgcgcgtgctttccagtcgcaccttctaa

SEQ ID NO: 188 - DNA, 1560 bp, Adenovirus D69
  MISC_FEATURE (1)..(1560): Penton Gene
atgaggcgtgcggtggtgtcttcctctcctcctccctcgtacgagagcgtgatggcgcaggcgaccctggaggttccgtttgtgcctccgcggtatatggctcctacggagggcagaaacagcattcgttactcagagctggctccgctgtacgacaccactcgcgtgtacttggtggacaacaagtcggcggacatcgcttccctgaactaccaaaacgaccacagcaacttcctgaccacggtggtgcagaacaacgatttcacccccgccgaggccagcacacaaacaataaattttgacgagcggtcgcggtggggcggtgatctgaagaccattctgcacaccaacatgcccaatgtgaacgagtacatgtttaccagcaagtttaaggcgcgggtgatggtggctagaaaaaaggcggaaggggctgatgcaaatgataggagcaaggatatcttagagtaccagtggtttgagtttaccctgcccgagggcaacttttccgagaccatgaccatagacctgatgaacaacgccatcttggaaaactacttgcaagtggggcggcaaaatggcgtgctggagagcgatattggagtcaagtttgacagcaggaatttcaagctgggctgggacccggtgaccaagctggtgatgccaggggtttacacctatgaggccttccacccggacgtggtgctgctgcctggctgcggggtggacttcaccgagagccgcctgagcaacctcctgggcattcgcaagaagcaacctttccaagagggcttcagaatcatgtatgaggatctagtagggggcaacatccccgccctcctgaatgtcaaggagtatctgaaggataaggaagaagctggcacagcagatgcaaataccattaaggctcagaatgatgcagtcccaagaggagataactatgcatcagcggcagaagccaaagcagcaggaaaagaaattgagttgaaggccattttgaaagatgattcaaacagaagctacaatgtgatcgagggaaccacagacaccctgtaccgcagttggtacctgtcctatacctacggggaccccgagaagggggtgcagtcgtggacgctgctcaccaccccggacgtcacctgcggcgcggagcaagtctactggtcgctgccggacctcatgcaagaccccgtcaccttccgctctacccagcaagtcagcaactaccccgtggttggcgccgagctcatgcccttccgcgccaagagcttttacaacgacctcgccgtctactcccagctcatccgcagctacacctccctcacccacgtcttcaaccgcttccccgacaaccagatcctctgccgcccgcccgcgcccaccatcaccaccgtcagtgaaaacgtgcctgctctcacagatcacgggacgcttccgctgcgcagcagtatccgcggagtccagcgagtgaccgtcactgacgcccgtcgccgcacctgtccctacgtctacaaggccctgggcatagtcgcgccgcgcgtgctttccagtcgcaccttctaa

SEQ ID NO: 189 - DNA, 2763 bp, Adenovirus A12
  MISC_FEATURE (1)..(2763): Hexon Gene
atgatggccactccctcgatgatgccgcagtggtcttacatgcacatcgccggtcaggatgcctcggagtacctgagtcccggtctggtgcaattcgcccgcgccacggacacctacttcaccctgggaaacaagtttagaaaccccaccgtggctcccacccatgatgttaccaccgatcgctcgcagcgtctgacgctgcgttttgtgcccgtggatcgggaagatactacctactcctacaaggctcgctttacgctggctgtgggtgacaaccgcgtgttagacatggctagttcttactttgacattcgaggggtactggatcgtggtcccagttttaagccctattccggaaccgcctacaattctttggcaccaaaaggcgctcctaatgcttcacaatggtcagataacgctaagcttaatacctttgctcaggcgccgtatcttagcgacactatcaccgccgccgatggtattaaagttggaacagacaccgcccaggcaggcgcggcggtgtatgccaacaaaacttatcagccagagccgcaagtaggaccaagtgaatggaacaccagcattgaaaacgttaaagctggcgggagggcattaaagcaaaccactgcaatgcagccgtgctatggctcctacgctcgtccaaccaacgaacacggaggacaatccaaggatgacaacattgaacttaagttctttgattcagctaacaatgcagcaaacactgctcaagttgtgttctataccgaagacgtaaaccttgaaatgccagacacgcatcttgtgtttaagcctactgttaccaatggaacaattgcttctgagtcgctgttgggacagcaagcagcgccaaatagagcaaactacattgcattcagagataattttattggcctgatgtattacaacagtacaggcaacatgggtgtattggccgggcaagcttcccaacttaacgcagtagtagacctgcaagacagaaatacagagctgtcataccagttaatgctggatgctttgggagacagaacacggtacttttccttgtggaattccgcagtggacagttacgaccctgacgttcgcgttattgagaatcacggggtagaggatgaactaccaaattattgctttcctcttagcgcagtaggtgaaataaaaaattacaaaggcattaagccagataacggaggaggaggtggctggactgccgacaacactgtcagtgaagcaaaccacataggcattgggaatatagccgccatggaaattaatttgcaggctaatttgtggagaagcttcttgtactcaaatgtgggcttatacctaccagacgacttaaaatacactccaggaaacataaaactacctgataacaagaacacctacgagtacatgaacgggcgtgtgactgccccggggttggtggatacctatgtcaatatcggcgctcgctggtccccagatgtgatggataatgtaaacccttttaaccaccaccgaaacgcagggttgcgctacagatccatgttgctaggcaatgggagatttgttccttttcacattcaggtgccgcaaaaattttttgccatcagaaatttgttgctgttgcccggttcctacacttacgaatggaactttagaaaggatgtaaacatgattcttcagagcacactgggaaatgatcttcgggtggacggagccagcgttcgctttgacaacattgccctgtatgctaacttttttcccatggcacataacacagcttctactttagaagccatgttaagaaatgacaccaacgaccagtcttttaacgattatttgtgtgctgcaaacatgctgtatcccatcccagctaacgccaccagcgtgcccatttcaataccttcgcgaaattgggcggcatttagaggctggagctttactcgcctaaaaactaaagaaactccttccctgggttcagggtttgacccctactttgtatactctggaaccattccctatttagacggcaccttttacctaaaccacacttttaagaaggtgtcaatcatgtttgactcctccgtgagttggcctggaaatgaccgtttgctaaccccaaatgaatttgaaataaagcgttctgtggatggggagggatacaatgtggcccaatgcaatatgactaaggattggttcctaatacaaatgcttagtcattacaacattggataccaaggtttttacattccagagagctacaaggaccgcatgtattctttctttagaaactttcagcccatgagtaggcaagttgtggataccacagaatataagaactacaaaaaagtaaccgtagagtttcaacataacaactcaggattcgtgggatacctgggccccactatgcgggagggacaagcttaccccgccaactatccctaccctcttataggcaaaacagctgtggaaagcatcacacagaaaaagtttctatgcgatcgtgttatgtggcgcatcccattttctagtaacttcatgtctatgggggcgctaacggatcttgggcaaaatatgctgtacgcaaactcagcccatgctctagacatgacatttgaggtggatccaatggatgagcctacccttctttatgttttatttgaagttttcgacgtggtacgcattcaccagccacaccgcggcgtcattgaagcggtctacctgcgcacgcccttctcggcgggtaacgctaccacctaa

SEQ ID NO: 190 - DNA, 2760 bp, Adenovirus A18
  MISC_FEATURE (1)..(2760): Hexon Gene
atggccactccgtcgatgatgccgcagtggtcttacatgcatatcgccggtcaggatgcctcggaatacctgagtcccgggctggtgcaattcgcccgtgccacggacacctacttcaccctgggcaacaagtttagaaatcccactgtagctcccactcatgacgttaccaccgatcgttctcagcggctgacactgcgttttgtgcccgtggatcgggaagatactgcttactcatacaaggctcgttttacgctagctgtgggtgataaccgcgtacttgatatggctagttcctactttgacattagaggggtactagaccgcggtcccagtttcaagccgtattctggaacggcttacaactctttggctccaaagggcgcgcccaatgctagccagtggctgactactaatgacaacaagtcccacacttttgctcaagcgccttacatagggagctccatcactaaagatggcattcaagtgggaacaaataccgccaatcccccacaaccagtatatgccgacaagacatatcaacccgaacctcaagtaggcgagagtcaatggaacgcgcctttgcctaacaacgcaaaagcagcaggaagggtgctcaagaacaccacacccatgtacccctgctatgggtcttacgcccgagccacaaatgaaaacggaggacaatcaaaaaataacgaaggggtggaaatgcaattttttgcatccgctgctgacaatcaaaatgatcccagtgttgtgctgtacagtgaggacgtaaacctggaagcccctgacacgcacattgtttttaagccagctgtagcagcagacactgttagttcggaactgctactaggtcaacaagcagcgcctaacagacccaattacattggcttcagagataacttcataggactaatgtactacaacagcactggaaatatgggagtgcttgccggacaggcttcgcagcttaatgcagtggtggacctgcaggacaggaatacagagctgtcctaccaacttatgctagacgctttaggcgaccgcagtcggtatttttctatgtggaactcagccgtggacagctacgatcctgatgtgcgaattattgaaaatcatggggtggaagacgaacttcccaattactgctttccactaggcgctgtggggattgtgaattcctacaaaggtgttaaatacgatgcaaatgcctgggcaaaggataacaacaaagcagataataataacttagcaacaggtaacatcttcgccatggaaataaacttgcaggctaatctgtggcgaagtttcttgtactcaaatgtgggcttgtacttacctgacagcttaaaatacactccgggaaacataaagctgcctgataataaaaacacctacgagtacatgaatggccgtgttacagccccggggttggtggatacttatgttaacatcggagctcgttggtcgccagatgttatggataacataaatccttttaaccaccaccgaaacgcagggctccgatacagatctatgctactaggcaatggcaggtttgtgccttttcacattcaggtgccgcagaaattttttgccataagaaacttgctgcttttacctggttcgtacacgtacgaatggaactttagaaaagatgtaaatatgatacttcaaagcaccctaggcaatgacctgcgggtggatggggcaagcattcgctttgacaacatcgcgctgtacgccaactttttccctatggctcataatacggcgtccaccctagaagctatgttgagaaatgacaccaacgaccagtcatttaatgactacctatgcgctgcaaacatgctgtaccctatcccagccaacgcaaccagtgtgccgatttctataccttccagaaattgggcagcatttaggggatggagttttactcgcttaaaaactaaggaaacaccgtcactgggctctggctttgacccgtactttgtgtactcgggaaccattccctatttggacggtacattttatcttaatcatactttcaaaaaggtgtcaattatgtttgactcctctgttagctggccgggaaacgaccgtttgcttacgcccaacgagtttgaaattaagcgttctgtggatggggaagggtacaacgtggctcaatgcaacatgactaaagactggtttcttatccagatgcttagtcactacaacattgggtaccagggtttctatgtgccagaaggctacaaagaccgaatgtattctttcttcagaaactttcagcctatgagtagacaggttgttgacactactgagtacaaagactacaaacaagtaacagtgaagtttcaacataacaattcagggttcgtgggctacttgggtcccaccatgcgggaaggtcaagcttatccagctaactatccctatcccctaattggaaagaccgctgtggaaagcataacgcagaaaaagtttttgtgcgatcgcgtaatgtggcgcatcccattttccagcaattttatgtctatgggagcgcttaccgaccttggacaaaacatgctgtatgcaaattccgcccatgctttggacatgacatttgaggtggatccaatggacgagcccacccttctttatgttttgtttgaagttttcgacgtggtgcggattcatcagccgcaccgcggcgtcatcgaagcggtatacctacgcacgcctttctctgcgggtaacgctaccacctaa

SEQ ID NO: 191 - DNA, 2754 bp, Adenovirus A31
  MISC_FEATURE (1)..(2754): Hexon Gene
atgatgccgcagtggtcttacatgcacatcgccggtcaggacgcctcggagtacctgagtcccggtctggtgcaattcgcccgcgccacggacacctacttcaccctgggaaacaagtttaggaatcccactgtggctcccacccatgatgtcaccaccgaccgctcgcagcggttgacgctgcgttttgtgcccgtggatcgggaagatactgcttattcttacaaggctcgctttacgctggctgtgggggacaatcgcgtgcttgacatggctagctcttactttgatattagaggggtgctggatcgcggtcccagttttaagccttattcgggtaccgcctataactctttagctccaaagggcgcgcccaatgccagccaatggctaactacaaacaatggcaacaaaactcacacttttgctcaagcgccttacataggagactctatcagtaaagacggcattcaagttgggacaaacactgccaatccccagcaagcagtatatgccgacaaaacataccagccagaacctcaagtaggcgaaagtcaatggaacgcttcagtatctaacaatgcaaaagcagcaggaagggtgttaaaaagcactacgcccatgtatccgtgctatgggtcttatgcacgagcaacaaatgaaaaaggaggtcaatcaaaaaataacgacggtgtggaaatgcgattttttgcatccagtgcgaatgacaatcaaaatgatccaactgttgtaatgtatagcgaggacgtaaacttagaggctcctgacacacacattgtttacaaaccagctgtaactgcggacactatcagttcagaactcctcctaggacaacaagcagcacctaacagaccaaattacattgccttcagagacaattttattgggcttatgtattacaacagcactggaaacatgggagtacttgcaggacaggcttctcagctcaatgcagtggttgatctgcaagataggaacacagagctgtcctaccaacttatgttggatgctttaggcgatagaagccgttatttttccatgtggaattctgccgtcgacagctacgatccagacgtgcgaattattgaaaatcatggtgtggaagacgaactgcccaattactgttttccgttaggggctgtaggcgttgtgaattcatacaaaggtgtgaaacaaaatgacggaaatggttgggtaaaagatgacagtgtagcagataccaatgacatagccaaaggtaatatatttgccatggaaattaacttacaggcaaatttgtggagaagttttctgtattcaaatgtggggctgtacctgcctgacgacttgaaatacacccccgggaacataaaacttccagaaaacaaaaacacctacgagtacatgaacgggcgcgtgactgttcccggtctggtagacacctacgttaacattggcgcgcgctggtctcctgacgtaatggataacataaacccttttaaccaccaccgaaacgcagggttgcgctataggtccatgttactgggcaacggtagatttgttccgtttcacattcaggtacctcagaaatttttcgctattaagaatttgctgctgttaccagggtcctacacttacgagtggaacttcagaaaagatgtaaacatgatacttcagagcaccctgggcaatgatcttagagtggacggagccagcattcgctttgacaacattgccctgtatgcaaacttcttccccatggctcacaatacagcttctacattggaagccatgctgcgaaatgacaccaatgaccagtctttcaacgattacttgtgcgcggcgaacatgttgtatcccattccagcaaatgccaccagcgtgcccatttcaataccttcgcgaaattgggcagccttcagagggtggagttttactcgccttaaaactaaagagacaccttctcttggttcagggtttgacccctactttgtttactctggaaccattccctacctggacgggactttttacctgaaccacacttttaaaaaggtgtcaatcatgtttgactcctctgttagctggcctggaaatgacaggctgttaacaccaaatgaatttgaaataaaacgttctgtagacggggaaggctacaatgtggcccaatgtaatatgaccaaagattggtttctagtacaaatgctcagtcattataatattggataccagggtttttacgttccagagagctacaaagaccgcatgtattctttcttcagaaactttcagcccatgagcaggcaggttgtagacactactgaatacaaggagtataaaaaagtaaccgtggaattccagcataacaactcagggtttgtgggatacctgggtcctactatgcgcgagggacaagcttatcccgcaaactacccctatcctctcataggaaaaaccgctgtacagagcgtcacacaaaaaaagtttctctgtgaccgtgtgatgtggcgcattccattttctagcaattttatgtcaatgggggcgttgacagacctcgggcaaaatatgctgtatgcaaattcggcccatgcgttagatatgacatttgaagttgaccccatggaagagcccacccttctttatgttttgtttgaagttttcgacgtggtgcgcattcatcaaccacaccgcggagtcattgaagcggtctatctgcgcacacccttctccgcgggtaacgccaccacctaa

SEQ ID NO: 192 - DNA, 2835 bp, Adenovirus B3
  MISC_FEATURE (1)..(2835): Hexon Gene
atggccaccccatcgatgatgccccaatgggcatacatgcacatcgccggacaggatgcttcggagtacctcagtccgggtctggtgcagttcgcccgtgcaacagacacctacttcagtatggggaacaaatttagaaaccccacagtggcgcccacccacgatgtgaccaccgaccgtagccagcgcctgatgctgcgcttcgtgcccgttgaccgggaagacaatacctactcttacaaagttcgctacacgctggctgtaggcgacaacagagtgcttgacatggccagcacattctttgacattcggggggtgcttgatagaggtcctagcttcaagccatattccggcacagcttacaattcactcgctcctaagggcgcgcccaatacatctcagtggatagttacaacaaatggggacaatgcagtaactaccaccacaaacacatttggcattgcttccatgaagggagacaatattactaaagaaggtttgcaaattgggaaagacattaccactactgaaggagaagaaaagcccatttatgccgataaaacatatcagccagagcctcaagttggagaagaatcatggactgatactgatggaacaaatgaaaagtttggtggaagagcccttaaaccagctaccaacatgaagccatgctacgggtcttttgcaagacctacaaacataaaagggggccaagctaaaaacagaaaagtaaaaccaacaaccgaaggaggggttgaaactgaggaaccagatattgatatggaatttttcgatggtagagatgctgttgcaggagctttagcgcctgaaattgtgctttatacggaaaatgtaaatttggaaactccagacagtcatgtggtatataaaccagaaacgtctaataactctcatgcaaatttgggtcaacaagccatgcctaacagacccaattacattggcttcagggataacttcgtaggcctaatgtactacaacagtactggaaatatgggagttttggctggccaagcatcacaactgaatgcagtggttgacttgcaggacagaaatactgaactgtcatatcagcttttgcttgattctctgggagacagaaccagatacttcagcatgtggaatcaggctgtggacagttacgatcccgatgttcgcattattgaaaatcatggcatcgaggatgaactgcctaattactgttttcctctgaatggcataggaccagggcacacatatcaaggcattaaagttaaaaccgatgacactaatggatgggaaaaagatgctaatgttgctccagctaatgaaataaccataggcaacaacctggctatggaaattaatatccaagctaacctttggagaagttttctgtactctaatgtggctttgtaccttccagatgtttacaagtacacgccacctaacattactttgcccactaacaccaacacctatgagtacatgaacgggcgagtggtatccccatccctggttgattcatacatcaacattggcgccaggtggtctcttgacccaatggacaatgtgaatccattcaaccaccaccgcaatgctggtctgcgctacaggtccatgcttctgggaaatggtcgttatgtgcctttccacatacaagtgcctcagaaattctttgctgtcaagaacctacttcttctacctggctcctacacctacgagtggaacttccgaaaggatgtgaacatggtcctgcaaagttcccttggaaatgacctcagaacggatggtgctaccataagtttcaccagcatcaatctctatgccaccttcttccccatggctcacaacacagcttccacccttgaagccatgctgcgcaacgataccaatgatcagtcatttaacgactacctctctgcagctaacatgctttaccccattcctgccaatgcaaccaacattccaatttccatcccatctcgcaactgggcagccttcaggggctggtccttcaccagactcaaaaccaaggagactccatctcttggatcagggttcgatccctacttcgtatattctggatctattccctacctggatggcaccttttaccttaaccacactttcaagaaggtctccatcatgtttgactcctcagtcagctggcctggcaatgacaggctgttgagtccaaatgagtttgaaatcaagcgcactgtggacggggaaggatacaacgtggcacaatgcaacatgaccaaagactggttcctggttcagatgcttgccaattacaacattggctaccagggcttttacatccctgagggatacaaggatcgcatgtactcctttttcagaaacttccagcctatgagcaggcaggtggttgatgaggttaattacactgactacaaagccgtcaccttaccataccaacacaacaactctggctttgtagggtaccttgcacctactatgagacaaggggaaccttacccagccaattatccatacccgctcatcggaactactgccgttaagagtgtcacccagaaaaagttcctgtgcgacaggaccatgtggcgcattcccttctccagcaacttcatgtccatgggggcccttaccgacctgggacagaacatgctctatgccaactcagcccatgcgctggacatgacttttgaggtggatcccatggatgagcccaccctgctttatcttcttttcgaagtcttcgacgtggtcagagtgcaccagccacaccgcggcgtcatcgaggccgtctacctgcgcacaccgttctcggccggcaacgccaccacataa

SEQ ID NO: 193 - DNA, 2814 bp, Adenovirus B7
  MISC_FEATURE (1)..(2814): Hexon Gene
atggccaccccatcgatgatgccccaatgggcatacatgcacatcgccggacaggatgcttcggagtacctgagtccgggtctggtgcagttcgcccgtgcaacagacacctacttcagtatggggaacaaatttagaaaccccacagtggcgcccacccacgatgtgaccaccgaccgtagccagcgactgatgctgcgcttcgtacccgttgaccgggaagacaatacctactcttacaaagttcgctacacgctggctgtaggcgacaacagagtgcttgacatggccagcacattctttgacattcggggggtgcttgatagaggtcctagctttaagccatattctggcacagcttacaattcactggctcctaagggcgcgcccaatacatctcagtggatagttacagcaggagaagaaagagcagtaactaccaccacaaacacatttggcattgcttccatgaagggagacaatattactaaagaaggtttagaaattgggaaagacattactgcagacaacaagcccatttatgccgataaaacatatcagccagagcctcaagttggagaagaatcatggactgatactgatggaacaaatgaaaagtttggaggtagagctcttaaaccagctaccaaaatgaagccatgctacgggtcttttgcaagacctacaaatataaaagggggccaagctaaaaacagaaaagtaaaaccaaccgaaggagatgttgagactgaggagccagatattgatatggaattttttgatggtagagaagctgctgacgctttttcgcctgaaattgtgctttacacggaaaatgtcaatttagaaactccagacagccatgtagtttacaagccaggaacttctgatgataactctcatgcaaatttgggtcaacaagccatgcctaacagacccaattacattggcttcagggataactttgtaggcctaatgtactacaacagtactggaaatatgggagttttggctggccaagcatcacaactgaatgcagtggttgacttgcaggacagaaacactgaactgtcatatcagcttttgcttgattctctgggagacagaaccagatacttcagtatgtggaaccaggctgtggacagttatgatcccgatgttcgcattattgaaaatcacggcatcgaggatgaactgcctaattactgttttcctctggatggcataggaccagcgaaaacatatcaaggcattaaatctaaagacaatggatgggaaaaagatgataatgtttctaaatctaatgaaatagccataggcaacaaccaggctatggaaattaatatccaagctaacctttggagaagttttctgtactccaatgtggctttgtaccttccagatgtttacaagtacacgccaactaacattactctgcccgccaacaccaacacctatgagtacatgaacgggcgagtggtatccccatctctggttgattcatacatcaacattggcgccaggtggtctcttgacccaatggacaatgtgaatccattcaaccaccaccgcaatgctggtctgcgctaccggtccatgcttctgggcaatggtcgttatgtgcctttccacatacaagtgcctcaaaaattctttgctgtcaagaacctacttcttctacctggctcctacacctatgagtggaacttcagaaaggatgtgaacatggtcctgcaaagttcccttggaaatgacctcagaacagatggtgctaccataagtttcaccagcatcaatctgtatgccaccttcttccccatggctcacaacacagcttccacccttgaagccatgctgcgcaacgataccaatgatcagtcattcaacgactacctctctgcagctaacatgctttaccccatccctgccaatgcaaccaacattccaatttccatcccatctcgcaactgggcagccttcaggggctggtccttcactaggctcaaaaccaaggagactccatctcttggatcagggttcgatccctacttcgtatattctggatctattccctacctggatggcaccttttaccttaaccacactttcaagaaggtctccatcatgtttgactcctcagtcagctggcctggcaatgacaggctgttgagcccaaatgagtttgaaatcaagcgcactgtggacggggaagggtacaatgtggcccaatgtaacatgaccaaagactggttcctggttcagatgcttgccaactacaacattggctaccagggcttttacatccctgagggatacaaggatcgcatgtactcctttttcagaaacttccagcctatgagcaggcaggtggttgatgaggttaattacactgactacaaagccgtcaccttaccataccaacacaacaactctggctttgtagggtatcttgcacctactatgagacaaggggaaccttacccagccaattatccatacccgctcatcggaactactgccgttaagagtgtcacccagaaaaagttcctgtgtgacaggaccatgtggcgcattcccttctccagcaacttcatgtccatgggggcccttaccgacctgggacagaacatgctctatgccaactcagcccatgcgctggacatgacttttgaggtggatcccatggatgagcccaccctgctttatcttcttttcgaagtcttcgacgtggtcagagtgcaccagccacaccgcggcgtcatcgaggccgtctacctgcgcacaccgttctcggccggcaacgccaccacataa

SEQ ID NO: 194 - DNA, 2823 bp, Adenovirus B16
  MISC_FEATURE (1)..(2823): Hexon Gene
atggccaccccatcgatgatgccccaatgggcatacatgcacatcgccggacaggatgcttcggagtacctgagtccgggtctggtgcagttcgcccgtgcaacagacacctacttcagtatggggaacaagtttagaaaccccacagtggcgcccacccacgatgtgaccaccgaccgtagccagcgactaatgctgcgcttcgtgcccgttgaccgggaagacaatacctactcttacaaagttcgctacacgctggctgtaggggacaacagagtactggatatggccagcacgttctttgacatccgcggcgtgctggaccggggccctagcttcaaaccctactccgggaccgcctacaacagcctggctcccaagggagcgcccaacacctgccagtggaaggattctgacagcaaaatgcatacctttggggtagctgccatgcccggtgttactgggaaaaagatagaagctgatgggctgcctattggaatagattcaacttctggaactgacacagtaatttatgctgataaaactttccaaccagaaccacaagttggaaatgccagttgggttgacgccaatggtacagaggaaaaatatggaggcagagctctgaaggacactacaaagatgaaaccctgctatggttctttcgccaagcctaccaacaaagaaggtggtcaggctaacttaaaagattcagaaaccgccgccaccactcctaactatgatatagatctggctttctttgacaacaaaaatattgctgctaactacgatccagatattgtaatgtacacagaaaatgttgacttgcagactccagatactcatattgtatacaaacctggaacagaggacaccagctctgaatccaatttgggtcagcaagccatgcctaacagacccaactacattggcttcagagacaattttattgggctcatgtactacaacagcactggcaatatgggggtgctggccggtcaggcctctcagctgaatgctgtggttgacttgcaagacagaaacactgaactgtcctaccagctcttgcttgactctctgggtgacagaacccggtatttcagtatgtggaatcaggcggtggacagctatgatcctgatgtgcgtattattgaaaaccatggtgtggaggacgaattgccaaactattgctttccgttgaatggtgtgggatttacagacacttaccaaggtgttaaagttaaaacagatgcagttgctggaaccagtggaacacagtgggacaaagatgacaccacagttagtactgctaatgaaatccatggaggcaatccttttgccatggaaatcaacatccaagccaatctatggcgaagtttcctttattccaatgtggctttgtatctcccagactcgtataaatacaccccgtccaatgtcactctcccagaaaacaaaaacacctacgactacatgaacgggcgggtggtgccgccatctctagtagacacctatgtgaacattggtgccaggtggtctctggatgccatggacaatgtcaacccattcaaccaccaccgtaacgctggcttgcgttaccgatccatgcttctgggtaacggacgttatgtgcctttccacatacaagtgcctcaaaaattcttcgctgttaaaaacctgctgcttctcccaggctcctacacttatgagtggaactttaggaaggatgtaaacatggttctacagagttcccttggtaacgacctacgggtagatggcgccagcatcagtttcacgagcatcaatctttatgctacttttttccccatggctcacaacaccgcttccacccttgaagccatgctgcggaatgacaccaatgatcagtcattcaacgactacctatctgcagctaacatgctctaccccatacctgccaacgcaaccaatattcccatttccattccttctcgcaactgggcggctttcagaggctggtcatttaccagactgaaaaccaaagaaactccctctttggggtctggatttgacccatactttgtctattccggttctattccctacctggatggtaccttctatctaaatcacacttttaagaaggtttccatcatgtttgactcttcagtgagctggcctggaaatgacaggttactatctcctaacgaatttgaaataaagcgcactgtggatggcgaaggctacaacgtagcccaatgcaacatgaccaaagactggttcttggtacagatgctcgccaactacaacattggctaccagggcttttacatccctgagggatacaaggatcgcatgtactcctttttcagaaacttccagcctatgagcaggcaggtggttgatgaggttaattacactgactacaaagccgtcaccttaccatatcaacacaacaactctggctttgtaggataccttgcgcctactatgagacaaggggaaccttacccagccaattatccatacccgctcatcggaactactgccgttaagagtgttacccaaaaaaagttcctgtgcgacaggaccatgtggcgcataccgttctccagcaacttcatgtccatgggggcccttacagacctgggacaaaacctgctctatgccaactcggcccatgcactggacatgacttttgaggtggatcccatggatgagcccaccctgctttatcttcttttcgaagtcttcgacgtggtcagagtgcaccagccacaccgcggcgtcatcgaggccgtctacctgcgcacaccgttctcggccggcaacgccaccacataa

SEQ ID NO: 195 - DNA, 2850 bp, Adenovirus B21
  MISC_FEATURE (1)..(2850): Hexon Gene
atggccaccccatcgatgctgccccagtgggcatacatgcacatcgccggacaggatgcttcggagtacctgagtccgggtctggtgcagttcgcccgcgccacagacacctacttcaatctggggaacaagtttaggaaccccaccgtggcgcccacccatgatgtgaccaccgaccgcagtcagcggctgatgctgcgctttgtgcccgttgaccgggaagacaatacctacgcatacaaagttcgatacaccttggctgtgggcgacaacagagtgctggatatggccagcactttctttgacattcggggtgtgttggatagaggccctagcttcaagccatactctggcactgcttacaactcgttggcccctaagggcgctcccaatacatctcagtggattgctgaaggcgtaaaaaaagaagatgggggatctgacgaagaggaagagaaaaatctcaccacttacacttttggaaatgccccagtgaaagcagaaggtggtgatatcactaaagacaaaggtcttccaattggttcagaaattacagacggcgaagccaaaccaatttatgcagataaactataccaaccagaacctcaggtgggagatgaaacttggactgacacagatggaacaactgagaagtatggtggtagagctctaaagccagaaactaaaatgaaaccctgctatgggtcttttgctaaacccactaacgtcaaaggcggacaggcaaaacaaaaaactactgaacaaccgcaaaaccagcaggttgaatatgatattgacatgaacttttttgatgaagcgtcacagaaagcaaacttcagtccaaaaattgtgatgtatgcagaaaatgtagacttggaaaccccagacactcatgtggtgtacaaacctggtacttcagaagaaagttctcatgctaatctgggtcaacaatctatgcccaacagacccaactacattggctttagagataactttattggacttatgtactacaacagtactggcaacatgggagtgctggcaggtcaagcatcccaattgaatgcggtggttgacttgcaggacagaaacacagaactatcatatcaactactgcttgactctctgggtgacagaaccagatacttcagcatgtggaatcaagcagtcgatagctatgatcctgatgtgcgcattattgaaaatcatggggtggaagatgagcttcccaactactgctttccattggatggagtaggggtaccaataagtagttacaaaataattgaaccaaacggacagggtgcagattggaaagagcctgacataaatggaacaagtgaaattggacaaggaaatctctttgccatggaaattaacctccaagctaatctctggagaagttttctttattccaatgtggctctgtatctcccagactcctacaaatacaccccagccaatgtcactcttccaactaacaccaacacttatgactacatgaatgggcgggtggttcccccatccctggtggatacctacgtaaacattggcgccagatggtctttggatgccatggacaatgtcaacccctttaaccatcaccgcaacgctggcctgcgataccggtccatgcttttgggcaatggtcgttacgtgcctttccacattcaagtgcctcagaaattctttgctgtgaagaacctgctgcttctacccggttcttacacctacgagtggaacttcagaaaggatgtgaacatggtcctgcagagttcccttggtaatgatctccgggtcgatggtgccagcataagttttaccagcatcaatctctatgccaccttcttccccatggcccacaacactgcctccacccttgaagccatgctgcgcaatgacaccaatgatcaatcattcaatgactacctttctgctgccaacatgctctaccccatcccggccaacgctaccaacgttcccatctccattccctctcgcaactgggccgccttcagaggctggtccttcaccagactcaaaaccaaggagactccctctttgggatcagggttcgatccctactttgtttactctggttctataccctacctggatggtaccttctaccttaaccacactttcaagaaagtctccatcatgtttgactcttcagtgagctggcctggtaatgacagattgctaagtccaaatgagttcgaaatcaagcgcacagttgatggggaaggctacaatgtggcccaatgtaacatgaccaaagactggttcctggtccagatgcttgccaactacaacattggataccagggcttctacgttcctgagggttacaaggatcgcatgtactccttcttcagaaacttccagcccatgagtagacaggtggttgatgagattaactacaaagactataaagctgtcgccgtaccctaccagcataataactctggctttgtgggttacatggctcctaccatgcgtcagggtcaagcgtaccctgctaactacccataccccctaattggaaccactgcagtaaccagtgtcacccagaaaaaattcctgtgcgacaggaccatgtggcgcatcccattctctagcaacttcatgtccatgggtgcccttacagacctgggacagaacttgctgtatgccaactcggcccatgcgctggacatgacttttgaggtggatcccatggatgagcccaccctgctttatcttcttttcgaagtcttcgacgtggtcagagtgcaccagccacaccgcggcgtcatcgaggccgtctacctgcgcacaccgttctcggccggcaacgccaccacataa

SEQ ID NO: 196 - DNA, 2787 bp, Adenovirus B50
  MISC_FEATURE (1)..(2787): Hexon Gene
atgcacatcgccggacaggatgcttcggagtacctgagtccgggtctggtgcagttcgcccgcgccacagacacctacttcaatctggggaacaagtttaggaaccccaccgtggcgcccacccatgatgtgaccaccgaccgcagtcagcggctgatgctgcgctttgtgcccgttgaccgggaagacaatacctacgcatacaaagttcgatacaccttggctgtgggcgacaacagagtgctggatatggccagcactttctttgacattcggggtgtgttggatagaggtcctagcttcaagccatattctggcactgcttacaactcattggcccctaagggcgctcccaatacatctcagtggcttaataagggagatgaagaggatggggaagacgaccaacaagctacatacacttttggcaatgcgccagtaaaagccgaagctgaaattacaaaagaaggactgccaataggtttggaagttccatctgaaggtggccctaaacccatttatgctgataaactgtatcagccagaacctcaggtgggagaggaatcttggactgatacggatggcacagatgaaaaatatggaggcagagcacttaaacctgaaactaaaatgaaaccctgctacgggtctttcgctaaacctactaatgttaaaggcgggcaggcaaaagtgaagaaagaagaagaaggcaaggttgaatatgacattgacatgaactttttcgacctaagatcacaaatgactggcctcaagcctaaaattgtaatgtatgcagaaaatgtggatctagaaactcctgacactcatgtggtgtacaaacctggagcttcagatgctagctctcatgcaaaccttggtcaacagtccatgcccaatagacctaactatattggcttcagggacaacttcatcggactcatgtactacaacagtactggcaacatgggagtgctggctggacaagcgtctcagctaaatgcagtggttgacttgcaagacagaaacacagaattgtcatatcaactcttgcttgattctctgggggacagaaccagatatttcagtatgtggaatcaagcagtggatagctatgacccagatgtgcgtgttattgagaaccatggtgtggaagatgaacttcctaactattgttttccattggatggtgtaggtccgcgaatagacagttacaagggaattgagacaaatggtgatgaaaccactacttggaaagatttagagccaaagggcataagtgaaattgctaagggaaatccgtttgccatggaaattaacctccaagctaatctctggagaagttttctttattccaatgtggctctgtatctcccagactcctacaaatacaccccagccaatgtcactcttccaactaacaccaacacttatgactacatgaatgggcgggtggttcccccatccctggtggatacctacgtaaacattggcgccagatggtctttggatgccatggacaatgtcaacccctttaaccatcaccgcaacgctggcctgcgataccggtccatgcttttgggcaatggtcgttacgtgcctttccacattcaagtgcctcagaaattctttgctgtgaagaacctgctgcttctacccggttcttacacctacgagtggaacttcagaaaggatgtgaacatggtcctgcagagttcccttggtaatgatctccgggtcgatggtgccagcataagttttaccagcatcaatctctatgccaccttcttccccatggcccacaacactgcctccacccttgaagccatgctgcgcaatgacaccaatgatcaatcattcaatgactacctttctgctgccaacatgctctaccccatcccggccaacgctaccaacgttcccatctccattccctctcgcaactgggccgccttcagaggctggtccttcaccagactcaaaaccaaggagactccctctttgggatcagggttcgatccctactttgtttactctggttctataccctacctggatggtaccttctaccttaaccacactttcaagaaagtctccatcatgtttgactcttcagtgagctggcctggtaatgacagattgctaagtccaaatgagttcgaaatcaagcgcacagttgatggggaaggctacaatgtggcccaatgtaacatgaccaaagactggttcctggtccagatgcttgccaactacaacattggataccagggcttctacgttcctgagggttacaaggatcgcatgtactccttcttcagaaacttccagcccatgagtagacaggtggttgatgagattaactacaaagactataaagctgtcgccgtaccctaccagcataataactctggctttgtgggttacatggctcctaccatgcgtcagggtcaagcgtaccctgctaactacccataccccctaattggaaccactgcagtaaccagtgtcacccagaaaaaattcctgtgcgacaggaccatgtggcgcatcccattctctagcaacttcatgtccatgggtgcccttacagacctgggacagaacttgctgtatgccaactcggcccatgcgctggacatgacttttgaggtggatcccatggatgagcccaccctgctttatcttcttttcgaagtcttcgacgtggtcagagtgcaccagccacaccgcggcgtcatcgaggccgtctacctgcgcacaccgttctcggccggcaacgccaccacataa

SEQ ID NO: 197 - DNA, 2847 bp, Adenovirus B11
  MISC_FEATURE (1)..(2847): Hexon Gene
atggccaccccatcgatgctgccccaatgggcatacatgcacatcgccggacaggatgcttcggagtacctgagtccgggtctggtgcagttcgcccgcgccacagacacctacttcaatctgggaaataagtttagaaatcccaccgtagcgccgacccacgatgtgaccaccgaccgtagccagcggctcatgttgcgcttcgtgcccgttgaccgggaggacaatacatactcttacaaagtgcggtacaccctggccgtgggcgacaacagagtgctggatatggccagcacgttctttgacattaggggtgtgttggacagaggtcccagtttcaaaccctattctggtacggcttacaactccctggctcctaaaggcgctccaaatacatctcagtggattgcagaaggtgtaaaaaatacaactggtgaggaacacgtaacagaagaggaaaccaatactactacttacacttttggcaatgctcctgtaaaagctgaagctgaaattacaaaagaaggactcccagtaggtttggaagtttcagatgaagaaagtaaaccgatttatgctgataaaacatatcagccagaacctcagctgggagatgaaacttggactgaccttgatggaaaaaccgaaaagtatggaggcagggctctcaaacccgatactaagatgaaaccatgctacgggtcctttgccaaacctactaatgtgaaaggcggtcaggcaaaacaaaaaacaacggagcagccaaatcagaaagtcgaatatgatatcgacatggagttttttgatgcggcatcgcagaaaacaaacttaagtcctaaaattgtcatgtatgcagaaaatgtaaatttggaaactccagacactcatgtagtgtacaaacctggaacagaagacacaagttccgaagctaatttgggacaacaatctatgcccaacagacccaactacattggcttcagagataactttattggacttatgtactataacagtactggtaacatgggggtgctggctggtcaagcgtctcagttaaatgcagtggttgacttgcaggacagaaacacagaactttcttaccaactcttgcttgactctctgggcgacagaaccagatactttagcatgtggaatcaggctgtggacagttatgatcctgatgtacgtgttattgaaaatcatggtgtggaagatgaacttcccaactactgttttccactggacggcataggtgttccaacaaccagttacaaatcaatagttccaaatggagacaatgcgcctaattggaaggaacctgaagtaaatggaacaagtgagatcggacagggtaatttgtttgccatggaaattaaccttcaagccaatctatggcgaagtttcctttattccaatgtggctctatatctcccagactcgtacaaatacaccccgtccaatgtcactcttccagaaaacaaaaacacctacgactacatgaacgggcgggtggtgccgccatctctagtagacacctatgtgaacattggtgccaggtggtctctggatgccatggacaatgtcaacccattcaaccaccaccgtaacgctggcttgcgttaccgatccatgcttctgggtaacggacgttatgtgcctttccacatacaagtgcctcaaaaattcttcgctgttaaaaacctgctgcttctcccaggctcctacacttatgagtggaactttaggaaggatgtgaacatggttctacagagttccctcggtaacgacctgcgggtagatggcgccagcatcagtttcacgagcatcaacctctatgctacttttttccccatggctcacaacaccgcttccacccttgaagccatgctgcggaatgacaccaatgatcagtcattcaacgactacctatctgcagctaacatgctctaccccattcctgccaatgcaaccaatattcccatttccattccttctcgcaactgggcggctttcagaggctggtcatttaccagactgaaaaccaaagaaactccctctttggggtctggatttgacccctactttgtctattctggttctattccctacctggatggtaccttctacctgaaccacacttttaagaaggtttccatcatgtttgactcttcagtgagctggcctggaaatgacaggttactatctcctaacgaatttgaaataaagcgcactgtggatggcgaaggctacaacgtagcccaatgcaacatgaccaaagactggttcttggtacagatgctcgccaactacaacatcggctatcagggcttctacattccagaaggatacaaagatcgcatgtattcatttttcagaaacttccagcccatgagcaggcaggtggttgatgaggtcaattacaaagacttcaaggccgtcgccataccctaccaacacaacaactctggctttgtgggttacatggctccgaccatgcgccaaggtcaaccctatcccgctaactatccctatccactcattggaacaactgccgtaaatagtgttacgcagaaaaagttcttgtgtgacagaaccatgtggcgcataccgttctcgagcaacttcatgtctatgggggcccttacagacttgggacagaatatgctctatgccaactcagctcatgctctggacatgacctttgaggtggatcccatggatgagcccaccctgctttatcttctcttcgaagttttcgacgtggtcagagtgcatcagccacaccgcggcatcatcgaggcagtctacctgcgtacaccgttctcggccggtaacgctaccacgtaa

SEQ ID NO: 198 - DNA, 2838 bp, Adenovirus B14a
  MISC_FEATURE (1)..(2838): Hexon Gene
atggccaccccatcgatgctgccccagtgggcatacatgcacatcgccggacaggatgcttcggagtacctgagtccgggtctggtgcagttcgcccgcgccacagacacctacttcaatctgggaaataagtttagaaatcccaccgtagcgccaacccacgatgtgaccaccgaccgtagccagcggctcatgttgcgcttcgtgcccgttgaccgggaggacaatacatactcttacaaagtgcggtacaccctggccgtgggcgacaacagagtgctggatatggccagcacgttctttgacattaggggcgtgttggacagaggtcccagtttcaaaccctattctggtacggcttacaactctctggctcctaaaggcgctccaaatgcatctcagtggttggataaaggggttgaaactactgaagaacggcaaaatgaagacggggaaaatgacgaaaaagctacatacacttttggcaatgccccagtaaaagccgatgctgacattacaaaagacggactaccaataggtttggaagtcccagctgaaggtgaccctaaacctatctacgctaataagctttaccaaccagaaccccaggtgggacaggaatcgtggactgatacagatggcactgaagaaaaatacggaggcagagtacttaaaccggacactaaaatgaaaccgtgctatgggtcttttgctaaacctactaatgtgaaaggcggacaggcaaaagtgaaaacagaagaaggcaacaacattgaatatgacattgacatgaacttttttgacttaagatcacaaaaacaaggtcttaaacctaagattgtaatgtatgcagaaaatgtggacctggaatctccagatactcatgttgtgtacaaacctgaagtttcagatgctagttcaaatgctaatcttggacagcagtctatgcccaacagacccaactacattggcttcagagataattttattggtcttatgtactataacagtactggtaacatgggggtgctggctggccaagcatctcagttgaatgcagtggttgacttgcaggacagaaacacagaactgtcttaccaactcttgcttgactccctgggcgatagaaccagatactttagcatgtggaatcaggctgttgacagttatgatcccgatgtgcgtgttattgaaaatcatggtgtggaagatgaacttcccaactactgttttccactggacggcatcggtccgcgaacagatagttacaaggagattcagttaaatggagaccaagcttggaaagatgtaaatccaaatggtatcagtgaacttgttaagggaaatccatttgccatggaaattaaccttcaagccaatctatggcgaagtttcctttattccaatgtggctctgtatctcccagactcgtacaaatacaccccgtccaatgtcactcttccagaaaacaaaaacacctacgactacatgaacgggcgggtggtgccgccatctctagtagacacctatgtgaacattggcgccaggtggtctctggatgctatggacaatgtcaacccattcaaccaccaccgtaacgctggcttgcgttaccgatccatgcttttgggtaacggacgttatgtgcctttccacatacaagtgcctcaaaaattcttcgctgtcaaaaacctgctgcttctcccaggctcctacacttatgagtggaacttcaggaaggatgtgaacatggtgctacagagttccctcggtaacgacctacgggtagatggcgccagcatcagtttcacgagcatcaacctctatgctacctttttccccatggctcacaacaccgcttccacccttgaagccatgctgcggaatgacaccaatgatcagtcattcaacgactatctatctgcagctaacatgctctatcccattcctgccaatgcaaccaatattcccatttccattccttctcgcaactgggcggctttcagaggctggtcatttaccagactcaaaaccaaagaaactccctctttggggtctggatttgacccctactttgtctattctggttctattccctacctggatggtaccttctacctgaaccacacttttaagaaggtttccatcatgtttgactcttcagtgagctggcctggaaatgacaggttactatctcccaacgaatttgaaataaagcgcactgtggatggcgaaggctacaatgtagcccaatgcaacatgaccaaagactggttcttggtacagatgctcgccaactacaacataggctatcagggcttctacattccagaaggatacaaagatcgcatgtattcatttttcagaaacttccagcccatgagcaggcaggtggttgatgaggtcaattacaaagacttcaaggccgtcgccataccctaccaacacaacaactctggctttgtgggttacatggctccgaccatgcgccaaggtcaaccctatcccgctaactatccctatccactcattggaacaactgccgtaaatagtgttacgcagaaaaagttcttgtgtgacagaaccatgtggcgcataccgttctcgagcaacttcatgtctatgggggcccttacagacttgggacagaacatgctttatgccaactcagctcatgctctggacatgacctttgaggtggatcccatggatgagcccaccctgctttatcttctcttcgaagttttcgacgtggtcagagtgcatcagccacatcgcggcatcatcgagacagtctacctgcgtacaccgttctcggccggtaacgctaccacgtaa

SEQ ID NO: 199 - DNA, 2838 bp, Adenovirus B14b; identical to SEQ ID NO: 198
  MISC_FEATURE (1)..(2838): Hexon Gene

SEQ ID NO: 200 - DNA, 2856 bp, Adenovirus B34
  MISC_FEATURE (1)..(2856): Hexon Gene
atggccaccccatcgatgctgccccaatgggcatacatgcacatcgccggacaggatgcttcggagtacctgagtccgggtctggtgcagttcgcccgcgccacagacacctacttcaatctgggaaataagtttagaaatcctaccgtagcgccgacccacgatgtgaccaccgatcgtagccagcggctcatgttgcgcttcgtgcccgttgaccgggaggacaatacatactcttacaaagtgcggtacaccctggccgtgggcgacaacagagtgctggatatggccagcacgttctttgacattaggggcgtgttggacagaggtcccagttttaaaccctattctggtacggcttacaactccctggctcctaaaggcgctccaaatgcatctcagtggttggataagggagttacaagcactggcctagtggacgacggcaatactgatgatggggaagaagccaaaaaagcaacatacacttttggtaatgctccagtaaaagccgaggctgaaatcacaaaagacggattgccggtgggcttggaagtttcaactgaaggtcctaaaccaatctatgctgataagctttatcagccagaacctcaagtgggagacgaaacttggactgacctagacggaaaaaccgaagagtatggagggagggttcttaaacctgaaactaaaatgaaaccctgctacggatcttttgctaaacctactaatattaaaggaggtcaggcaaaggtaaaaccaaaagaagacgatggcactaacaacatcgagtatgacattgacatgaacttctttgacttaagatcacaaagatcagaactcaaacctaaaattgtaatgtatgcagaaaatgtggacctggaatgtccagatactcatgttgtgtacaaacctggagtttcagatgctagttctgagaccaatcttggacaacagtctatgcccaacagacccaactacattggcttcagagataacttcatcggacttatgtactataacagtactggcaacatgggggtactggctggccaagcgtctcagttgaatgcagtggttgacttgcaggacagaaacacagaactgtcttaccaactcttgcttgactctctgggcgacagaaccagatactttagcatgtggaatcaggctgtggacagttatgatcctgatgtacgtgttattgaaaatcatggtgtggaagatgaacttcccaactattgttttccgttggatggtgtcggtccgcgaacagatagttacaaggagattaagccaaatggagaccaatctacttggacaaatgtagacccaactggcagcagtgaacttgctaagggaaatccatttgccatggaaattaaccttcaagccaatctatggcgaagtttcctttattccaatgtggctctatatctcccagactcgtacaaatacaccccgtccaatgtcactcttccagaaaacaaaaacacctacgactacatgaacgggcgggtggtgccgccatctctagtagacacctatgtgaacattggtgccaggtggtctctggatgccatggacaatgtcaacccattcaaccaccaccgtaacgctggcttgcgttaccgatccatgcttctgggtaacggacgttatgtgcctttccacatacaagtgcctcaaaaattcttcgctgttaaaaacctgctgcttctcccaggctcctacacttatgagtggaactttaggaaggatgtaaacatggttctacagagttccctcggtaacgacctacgggtagatggcgccagcatcagttttacgagcatcaacctctatgctacttttttccccatggctcacaacaccgcttccacccttgaagccatgctgcggaatgacaccaatgatcagtcattcaacgactacctatctgcagctaacatgctctaccccattcctgccaatgcaaccaatattcccatttccattccttctcgcaactgggcggctttcagaggctggtcatttaccagactgaaaaccaaagaaactccctctttggggtctggatttgacccctacttcgtctattctggttctattccctacctggatggtaccttctacctgaaccacacttttaagaaggtttccatcatgtttgactcttcagtgagctggcctggaaatgacaggttactatctcctaacgaatttgaaataaagcgcactgtggatggcgaaggctacaacgtagcccaatgcaacatgaccaaagactggttcttggtacagatgctcgccaactacaacatcggctatcagggcttctacattccagaaggatacaaagatcgcatgtattcatttttcagaaacttccagcccatgagcaggcaggtggttgatgaggtcaattacaaagacttcaaggccgtcgccataccctaccaacacaacaactctggctttgtgggttacatggctccgaccatgcgtcaaggtcaaccctatcccgctaactatccctatccactcattggaacaactgccgtaaatagtgttacgcagaaaaagttcttgtgtgacagaaccatgtggcgcataccgttctcaagcaacttcatgtctatgggagcccttacagacttgggacagaacatgctctatgccaactcagctcatgctctggacatgacctttgaggtggatcccatggatgagcccaccctgctttatcttctcttcgaagttttcgacgtggtcagagtgcatcagccacaccgcggcatcatcgaggcagtctacctgcgtacaccgttctcggccggtaacgctaccacgtaa

SEQ ID NO: 201 - DNA, 2859 bp, Adenovirus B35
  MISC_FEATURE (1)..(2859): Hexon Gene
atggccaccccatcgatgctgccccaatgggcatacatgcacatcgccggacaggatgcttcggagtacctgagtccgggtctggtgcagttcgcccgcgccacagacacctacttcaatctgggaaataagtttagaaatcccaccgtagcgccgacccacgatgtgaccaccgaccgtagccagcggctcatgttgcgcttcgtgcccgttgaccgggaggacaatacatactcttacaaagtgcggtacaccctggccgtgggcgacaacagagtgctggatatggccagcacgttctttgacattaggggcgtgttggacagaggtcccagtttcaaaccctattctggtacggcttacaactctctggctcctaaaggcgctccaaatgcatctcaatggattgcaaaaggcgtaccaactgcagcagccgcaggcaatggtgaagaagaacatgaaacagaggagaaaactgctacttacacttttgccaatgctcctgtaaaagccgaggctcaaattacaaaagagggcttaccaataggtttggagatttcagctgaaaacgaatctaaacccatctatgcagataaactttatcagccagaacctcaagtgggagatgaaacttggactgacctagacggaaaaaccgaagagtatggaggcagggctctaaagcctactactaacatgaaaccctgttacgggtcctatgcgaagcctactaatttaaaaggtggtcaggcaaaaccgaaaaactcggaaccgtcgagtgaaaaaattgaatatgatattgacatggaattttttgataactcatcgcaaagaacaaacttcagtcctaaaattgtcatgtatgcagaaaatgtaggtttggaaacgccagacactcatgtagtgtacaaacctggaacagaagacacaagttccgaagctaatttgggacaacagtctatgcccaacagacccaactacattggcttcagagataactttattggactcatgtactataacagtactggtaacatgggggtgctggctggtcaagcgtctcagttaaatgcagtggttgacttgcaggacagaaacacagaactttcttaccaactcttgcttgactctctgggcgacagaaccagatactttagcatgtggaatcaggctgtggacagttatgatcctgatgtacgtgttattgaaaatcatggtgtggaagatgaacttcccaactattgttttccactggacggcataggtgttccaacaaccagttacaaatcaatagttccaaatggagaagataataataattggaaagaacctgaagtaaatggaacaagtgagatcggacagggtaatttgtttgccatggaaattaaccttcaagccaatctatggcgaagtttcctttattccaatgtggctctgtatctcccagactcgtacaaatacaccccgtccaatgtcactcttccagaaaacaaaaacacctacgactacatgaacgggcgggtggtgccgccatctctagtagacacctatgtgaacattggtgccaggtggtctctggatgccatggacaatgtcaacccattcaaccaccaccgtaacgctggcttgcgttaccgatctatgcttctgggtaacggacgttatgtgcctttccacatacaagtgcctcaaaaattcttcgctgttaaaaacctgctgcttctcccaggctcctacacttatgagtggaactttaggaaggatgtgaacatggttctacagagttccctcggtaacgacctgcgggtagatggcgccagcatcagtttcacgagcatcaacctctatgctacttttttccccatggctcacaacaccgcttccacccttgaagccatgctgcggaatgacaccaatgatcagtcattcaacgactacctatctgcagctaacatgctctaccccattcctgccaatgcaaccaatattcccatttccattccttctcgcaactgggcggctttcagaggctggtcatttaccagactgaaaaccaaagaaactccctctttggggtctggatttgacccctactttgtctattctggttctattccctacctggatggtaccttctacctgaaccacacttttaagaaggtttccatcatgtttgactcttcagtgagctggcctggaaatgacaggttactatctcctaacgaatttgaaataaagcgcactgtggatggcgaaggctacaacgtagcccaatgcaacatgaccaaagactggttcttggtacagatgctcgccaactacaacatcggctatcagggcttctacattccagaaggatacaaagatcgcatgtattcatttttcagaaacttccagcccatgagcaggcaggtggttgatgaggtcaattacaaagacttcaaggccgtcgccataccctaccaacacaacaactctggctttgtgggttacatggctccgaccatgcgccaaggtcaaccctatcccgctaactatccctatccactcattggaacaactgccgtaaatagtgttacgcagaaaaagttcttgtgtgacagaaccatgtggcgcataccgttctcgagcaacttcatgtctatgggggcccttacagacttgggacagaatatgctctatgccaactcagctcatgctctggacatgacctttgaggtggatcccatggatgagcccaccctgctttatcttctcttcgaagttttcgacgtggtcagagtgcatcagccacaccgcggcatcatcgaggcagtctacctgcgtacaccgttctcggccggtaacgctaccacgtaa

SEQ ID NO: 202 - DNA, 2880 bp, Adenovirus C1
  MISC_FEATURE (1)..(2880): Hexon Gene
atgatgccgcagtggtcttacatgcacatctcgggccaggacgcctcggagtacctgagccccgggctggtgcagttcgcccgcgccaccgagacgtacttcagcctgaataacaagtttagaaaccccacggtggcgcctacgcacgacgtgaccacagaccggtctcagcgtttgacgctgcggtttatccccgtggaccgcgaggataccgcatactcgtacaaggcgcggtttaccctggctgtgggtgacaaccgtgtgcttgacatggcttccacatactttgacattcgcggcgtgctggaccggggccccacttttaagccctactccggcactgcctacaacgctctagcccccaaaggcgctcccaattcctgcgagtgggaacaagaagaaccaactcaggaaatggctgaagaacttgaagatgaggaggaggcagaggaggaggaggcagaggaggaggcagaagcaccacaagctgatcagaaggttaagaagactcatgtatatgctcaggctcctttggcaggggaaaaaattaccgccaatggcttacaaatagtttctgatacccaaactgaaggcaatccagtttttgccgatcccacttatcaacctgaacctcaggttggagaatctcagtggaatgaagctgaagcaactgcatctggaggcagagtactaaaaaagactactcccatgaaaccatgctacggatcgtatgccagacctacaaataaaaatgggggtcaaggtatactagtagcaaacaaccaaggtgctctagagtctaaagttgaaatgcagttttttgccccctctggcactgccatgaatgaaagaaatgctgttcagccaagtattgttttgtacagtgaggatgttaatatggaaactcctgatactcacatttcatacaaaccaagcaaaactgatgaaaactctaaggctatgttgggtcaacaagcaatgccaaacagacccaattacatcgcttttagggacaattttattggccttatgtattacaacagcactggtaacatgggtgtccttgctggacaagcatcacagctaaatgccgtggtagacttgcaggacagaaacacagagctgtcatatcaacttttgcttgattctattggcgatagaaccagatacttttccatgtggaatcaggctgtagacagctatgatccagatgtcagaatcattgaaaatcatggaactgaggatgagttgccaaattactgcttcccacttggcggtataggggtaactgacacctaccaaggtataaaatcaaacggaaacggtaatcctcaaaactggaccaaaaatgacgattttgcggcacgtaatgaaataggtgtgggaaacaactttgccctggagattaaccttaatgccaacctatggagaaatttcctctactccaacattgcactgtacctgcctgacaagctaaaatacactcctacaaatgtggaaatatctcccaaccctaattcatacgattatatgaacaagcgagtggtggctcccgggttggtggattgctacattaaccttggagcgcgttggtcattggactacatggacaacgtcaacccctttaaccatcaccgcaatgcgggcctacgctaccgctccatgttgctgggcaacggtcgctacgtgccctttcacatccaggttcctcagaagttttttgccattaagaacctcctactcttgccgggctcatacacctacgagtggaacttcaggaaagatgttaacatggtcctgcaaagctccctaggaaacgacctaagagttgacggagccagcattaagtttgacagcatttgcctctacgccaccttttttccgatggcccacaacaccgcctcaacgcttgaagccatgcttagaaacgacaccaacgaccagtcctttaacgactacctatccgccgccaacatgctttaccccatacccgccaacgccaccaacgtgcccatctctatcccctcgcgcaactgggcggctttccgaggctgggcctttacgcgccttaagactaaggaaaccccatccctgggttccggctacgacccttactatacctactctggctccataccctacctagacggaaccttttaccttaatcacaccttcaaaaaggtagccatcacctttgactcttctgttagctggcctggcaatgaccgtctgcttacccccaacgagtttgagatcaagcgttcagttgacggagagggctacaacgttgcccaatgcaacatgaccaaagactggttcttggtacagatgctagccaactacaacataggctaccagggcttttatatcccagaaagctataaggaccgcatgtactccttctttagaaacttccagcccatgagccgtcaggtggtggacgataccaaatacaaggactaccaacaggtgggcatcctccaccagcacaataactctggctttgttggttacctcgctcccaccatgcgagagggacaggcctaccccgccaacttcccctacccgcttataggcaagaccgcggttgacagtattacccagaaaaagtttctttgcgaccgcaccctttggcgcattccattctccagtaactttatgtccatgggtgcactcacagacctgggccaaaaccttctctatgcaaactccgcccacgcgctagatatgacttttgaggtggatcccatggacgagcccacccttctttatgttttgtttgaagtctttgacgtggtccgtgtgcaccagccgcaccgcggcgtcatcgagaccgtgtacctgcgcacgcccttctcggctggcaacgccacaacataa

SEQ ID NO: 203 - DNA, 2907 bp, Adenovirus C2
  MISC_FEATURE (1)..(2907): Hexon Gene
atggctaccccttcgatgatgccgcagtggtcttacatgcacatctcgggccaggacgcctcggagtacctgagccccgggctggtgcagtttgcccgcgccaccgagacgtacttcagcctgaataacaagtttagaaaccccacggtggcacctacgcacgacgtaaccacagaccggtcccagcgtttgacgctgcggttcatccctgtggaccgcgaggataccgcgtactcgtacaaagcgcggttcaccctggctgtgggtgacaaccgtgtgcttgatatggcttccacgtactttgacatccgcggcgtgctggacagggggcctacttttaagccctactccggcactgcctacaacgctctagctcccaagggcgctcctaactcctgtgagtgggaacaaaccgaagatagcggccgggcagttgccgaggatgaagaagaggaagatgaagatgaagaagaggaagaagaagagcaaaacgctcgagatcaggctactaagaaaacacatgtctatgcccaggctcctttgtctggagaaacaattacaaaaagcgggctacaaataggatcagacaatgcagaaacacaagctaaacctgtatacgcagatccttcctatcaaccagaacctcaaattggcgaatctcagtggaacgaagctgatgctaatgcggcaggagggagagtgcttaaaaaaacaactcccatgaaaccatgctatggatcttatgccaggcctacaaatccttttggtggtcaatccgttctggttccggatgaaaaaggggtgcctcttccaaaggttgacttgcaattcttctcaaatactacctctttgaacgaccggcaaggcaatgctactaaaccaaaagtggttttgtacagtgaagatgtaaatatggaaaccccagacacacatctgtcttacaaacctggaaaaggtgatgaaaattctaaagctatgttgggtcaacaatctatgccaaacagacccaattacattgctttcagggacaattttattggcctaatgtattataacagcactggcaacatgggtgttcttgctggtcaggcatcgcagctaaatgccgtggtagatttgcaagacagaaacacagagctgtcctatcaactcttgcttgattccataggtgatagaaccagatatttttctatgtggaatcaggctgtagacagctatgatccagatgttagaatcattgaaaaccatggaactgaggatgaattgccaaattattgttttcctcttgggggtattggggtaactgacacctatcaagctattaaggctaatggcaatggctcaggcgataatggagatactacatggacaaaagatgaaacttttgcaacacgtaatgaaataggagtgggtaacaactttgccatggaaattaacctaaatgccaacctatggagaaatttcctttactccaatattgcgctgtacctgccagacaagctaaaatacaaccccaccaatgtggaaatatctgacaaccccaacacctacgactacatgaacaagcgagtggtggctcccgggcttgtagactgctacattaaccttggggcgcgctggtctctggactacatggacaacgttaatccctttaaccaccaccgcaatgcgggcctccgttatcgctccatgttgttgggaaacggccgctacgtgccctttcacattcaggtgccccaaaagttttttgccattaaaaacctcctcctcctgccaggctcatatacatatgaatggaacttcaggaaggatgttaacatggttctgcagagctctctgggaaacgatcttagagttgacggggctagcattaagtttgacagcatttgtctttacgccaccttcttccccatggcccacaacacggcctccacgctggaagccatgctcagaaatgacaccaacgaccagtcctttaatgactacctttccgccgccaacatgctataccccatacccgccaacgccaccaacgtgcccatctccatcccatcgcgcaactgggcagcatttcgcggttgggccttcacacgcttgaagacaaaggaaaccccttccctgggatcaggctacgacccttactacacctactctggctccataccataccttgacggaaccttctatcttaatcacacctttaagaaggtggccattacctttgactcttctgttagctggccgggcaacgaccgcctgcttactcccaatgagtttgagattaaacgctcagttgacggggagggctacaacgtagctcagtgcaacatgaccaaggactggttcctggtgcagatgttggccaactacaatattggctaccagggcttctacattccagaaagctacaaggaccgcatgtactcgttcttcagaaacttccagcccatgagccggcaagtggttgacgatactaaatacaaggagtatcagcaggttggaattcttcaccagcataacaactcaggattcgtaggctacctcgctcccaccatgcgcgagggacaggcttaccccgccaacgtgccctacccactaataggcaaaaccgcggttgacagtattacccagaaaaagtttctttgcgatcgcaccctttggcgcatcccattctccagtaactttatgtccatgggcgcactcacagacctgggccaaaaccttctctacgccaactccgcccacgcgctagacatgacttttgaggtggatcccatggacgagcccacccttctttatgttttgtttgaagtctttgacgtggtccgtgtgcaccagccgcaccgcggcgtcatcgagaccgtgtacctgcgcacgcccttctcggccggcaacgccacaacataa

SEQ ID NO: 204 - DNA, 2859 bp, Adenovirus C5
  MISC_FEATURE (1)..(2859): Hexon Gene
atggctaccccttcgatgatgccgcagtggtcttacatgcacatctcgggccaggacgcctcggagtacctgagccccgggctggtgcagtttgcccgcgccaccgagacgtacttcagcctgaataacaagtttagaaaccccacggtggcgcctacgcacgacgtgaccacagaccggtcccagcgtttgacgctgcggttcatccctgtggaccgtgaggatactgcgtactcgtacaaggcgcggttcaccctagctgtgggtgataaccgtgtgctggacatggcttccacgtactttgacatccgcggcgtgctggacaggggccctacttttaagccctactctggcactgcctacaacgccctggctcccaagggtgccccaaatccttgcgaatgggatgaagctgctactgctcttgaaataaacctagaagaagaggacgatgacaacgaagacgaagtagacgagcaagctgagcagcaaaaaactcacgtatttgggcaggcgccttattctggtataaatattacaaaggagggtattcaaataggtgtcgaaggtcaaacacctaaatatgccgataaaacatttcaacctgaacctcaaataggagaatctcagtggtacgaaacagaaattaatcatgcagctgggagagtcctaaaaaagactaccccaatgaaaccatgttacggttcatatgcaaaacccacaaatgaaaatggagggcaaggcattcttgtaaagcaacaaaatggaaagctagaaagtcaagtggaaatgcaatttttctcaactactgaggcagccgcaggcaatggtgataacttgactcctaaagtggtattgtacagtgaagatgtagatatagaaaccccagacactcatatttcttacatgcccactattaaggaaggtaactcacgagaactaatgggccaacaatctatgcccaacaggcctaattacattgcttttagggacaattttattggtctaatgtattacaacagcacgggtaatatgggtgttctggcgggccaagcatcgcagttgaatgctgttgtagatttgcaagacagaaacacagagctttcataccagcttttgcttgattccattggtgatagaaccaggtacttttctatgtggaatcaggctgttgacagctatgatccagatgttagaattattgaaaatcatggaactgaagatgaacttccaaattactgctttccactgggaggtgtgattaatacagagactcttaccaaggtaaaacctaaaacaggtcaggaaaatggatgggaaaaagatgctacagaattttcagataaaaatgaaataagagttggaaataattttgccatggaaatcaatctaaatgccaacctgtggagaaatttcctgtactccaacatagcgctgtatttgcccgacaagctaaagtacagtccttccaacgtaaaaatttctgataacccaaacacctacgactacatgaacaagcgagtggtggctcccgggctagtggactgctacattaaccttggagcacgctggtcccttgactatatggacaacgtcaacccatttaaccaccaccgcaatgctggcctgcgctaccgctcaatgttgctgggcaatggtcgctatgtgcccttccacatccaggtgcctcagaagttctttgccattaaaaacctccttctcctgccgggctcatacacctacgagtggaacttcaggaaggatgttaacatggttctgcagagctccctaggaaatgacctaagggttgacggagccagcattaagtttgatagcatttgcctttacgccaccttcttccccatggcccacaacaccgcctccacgcttgaggccatgcttagaaacgacaccaacgaccagtcctttaacgactatctctccgccgccaacatgctctaccctatacccgccaacgctaccaacgtgcccatatccatcccctcccgcaactgggcggctttccgcggctgggccttcacgcgccttaagactaaggaaaccccatcactgggctcgggctacgacccttattacacctactctggctctataccctacctagatggaaccttttacctcaaccacacctttaagaaggtggccattacctttgactcttctgtcagctggcctggcaatgaccgcctgcttacccccaacgagtttgaaattaagcgctcagttgacggggagggttacaacgttgcccagtgtaacatgaccaaagactggttcctggtacaaatgctagctaactataacattggctaccagggcttctatatcccagagagctacaaggaccgcatgtactccttctttagaaacttccagcccatgagccgtcaggtggtggatgatactaaatacaaggactaccaacaggtgggcatcctacaccaacacaacaactctggatttgttggctaccttgcccccaccatgcgcgaaggacaggcctaccctgctaacttcccctatccgcttataggcaagaccgcagttgacagcattacccagaaaaagtttctttgcgatcgcaccctttggcgcatcccattctccagtaactttatgtccatgggcgcactcacagacctgggccaaaaccttctctacgccaactccgcccacgcgctagacatgacttttgaggtggatcccatggacgagcccacccttctttatgttttgtttgaagtctttgacgtggtccgtgtgcaccagccgcaccgcggcgtcatcgaaaccgtgtacctgcgcacgcccttctcggccggcaacgccacaacataa

SEQ ID NO: 205 - DNA, 2892 bp, Adenovirus C6
  MISC_FEATURE (1)..(2892): Hexon Gene
atggctaccccttcgatgatgccgcagtggtcttacatgcacatctcgggccaggacgcctcggagtacctgagccccgggctggtgcagttcgcccgcgccaccgagacgtacttcagcctgaataacaagtttagaaaccccacggtggcgcctacgcacgacgtgaccacagaccggtctcagcgtttgacgctgcggttcatccccgtggaccgcgaggatactgcgtactcgtacaaggcgcggttcaccctagctgtgggtgataaccgtgtgctagacatggcttccacgtactttgacatccgcggcgtgctggacaggggccctacttttaagccctactctggcactgcctacaacgcactggcccccaagggtgcccccaactcgtgcgagtgggaacaaaatgaaactgcacaagtggatgctcaagaacttgacgaagaggagaatgaagccaatgaagctcaggcgcgagaacaggaacaagctaagaaaacccatgtatatgcccaggctccactgtccggaataaaaataactaaagaaggtctacaaataggaactgccgacgccacagtagcaggtgccggcaaagaaattttcgcagacaaaacttttcaacctgaaccacaagtaggagaatctcaatggaacgaagcggatgccacagcagctggtggaagggttcttaaaaagacaactcccatgaaaccctgctatggctcatacgctagacccaccaattccaacggcggacagggcgttatggttgaacaaaatggtaaattggaaagtcaagtcgaaatgcaatttttttccacatccacaaatgccacaaatgaagttaacaatatacaaccaacagttgtattgtacagcgaagatgtaaacatggaaactccagatactcatctttcttataaacctaaaatgggggataaaaatgccaaagtcatgcttggacaacaagcaatgccaaacagaccaaattacattgcttttagagacaattttattggtctcatgtattacaacagcacaggtaacatgggtgtccttgctggtcaggcatcgcagttgaacgctgttgtagatttgcaagacagaaacacagagctgtcctaccagcttttgcttgattcaattggcgacagaacaagatacttttcaatgtggaatcaagctgttgacagctatgatccagatgtcagaattattgagaaccatggaactgaggatgagttgccaaattattgctttcctcttggtggaattgggattactgacacttttcaagctgttaaaacaactgctgctaacggggaccaaggcaatactacctggcaaaaagattcaacatttgcagaacgcaatgaaataggggtgggaaataactttgccatggaaattaacctgaatgccaacctatggagaaatttcctttactccaatattgcgctgtacctgccagacaagctaaaatacaaccccaccaatgtggaaatatctgacaaccccaacacctacgactacatgaacaagcgagtggtggctcctgggcttgtagactgctacattaaccttggggcgcgctggtctctggactacatggacaacgttaatccctttaaccaccaccgcaatgcgggcctgcgttaccgctccatgttgttgggaaacggccgctacgtgccctttcacattcaggtgccccaaaagttttttgccattaaaaacctcctcctcctgccaggctcatacacatatgaatggaacttcaggaaggatgttaacatggttctgcagagctctctgggaaacgaccttagagttgacggggctagcattaagtttgacagcatttgtctttacgccaccttcttccccatggcccacaacacggcctccacgctggaagccatgctcagaaatgacaccaacgaccagtcctttaatgactacctttccgccgccaacatgctatatcccatacccgccaacgccaccaacgtgcccatctccatcccatcgcgcaactgggcagcatttcgcggttgggccttcacacgcttgaagacaaaggaaaccccttccctgggatcaggctacgacccttactacacctactctggctccataccataccttgacggaaccttctatcttaatcacacctttaagaaggtggccattacttttgactcttctgttagctggccgggcaacgaccgcctgcttactcccaatgagtttgagattaagcgctcagttgacggggagggctataacgtagctcagtgcaacatgacaaaggactggttcctagtgcagatgttggccaactacaatattggctaccagggcttctacattccagaaagctacaaagaccgcatgtactcgttcttcagaaacttccagcccatgagccggcaagtggtggacgatactaaatacaaagattatcagcaggttggaattatccaccagcataacaactcaggcttcgtaggctacctcgctcccaccatgcgcgagggacaagcttaccccgctaatgttccctacccactaataggcaaaaccgcggttgatagtattacccagaaaaagtttctttgcgaccgcaccctgtggcgcatccccttctccagtaactttatgtccatgggtgcgctcacagacctgggccaaaaccttctctacgcaaactccgcccacgcgctagacatgacctttgaggtggatcccatggacgagcccacccttctttatgttttgtttgaagtctttgacgtggtccgtgtgcaccagccgcaccgcggcgtcatcgagaccgtgtacctgcgcacgcccttctcggccggcaacgccacaacataa

SEQ ID NO: 206 - DNA, 2859 bp, Adenovirus D8
  MISC_FEATURE (1)..(2859): Hexon Gene
atgtgccttaccgccagagaacgcgcgaagatggccaccccctcgatgatgccgcagtgggcgtacatgcacatcgccgggcaggacgcctcggagtacctgagcccgggtctggtgcagtttgcccgtgccaccgacacgtacttcagcctgggcaacaagtttagaaaccccacggtggctcccacccacgatgtgaccacggaccggtcccagcgtctgacgctgcgctttgtgcccgtggatcgcgaggacaccacgtactcgtacaaggcgcgcttcactctggccgtgggcgacaaccgggtgctagacatggccagcacgtactttgacatccgcggcgtcctggaccgcggtcccagcttcaaaccctactcgggcacggcttacaacagcctggctcccaagggcgcccccaatcccagtcagtgggaacaggcaaaaacaggagctggtgtagaccaaaatcaaaaagaaactcgcacttacggcgtagccgccactggcggatataacattacaaaagaaggacttcagattggaattgatgaaactaaagaagatccaaacaacaaaatttatgcagataaaacattccagccggaaccacaaataggggaaaataattggcaggacactaatgttttctatggcggcagagctcttaaaaaggaaaccaagatgaaaccatgctatggctcatttgccagaccaactaataaaaaaggagggcaggctaaagttttaaccactgaagatggtcaacctacagaaaactttgacatagacttggctttctttgatattccacaagctggtggaaatgacaatcttgatccagatatgattctgtatgccgaaaatgtaaatctagaaacacctgacacacatgtagtttataaaccaggcaaggatgatgcaagttctgccgctaacctcacacaacagtccatgccaaacagacccaactacatcggtttcagggacaactttgtgggacttatgtattacaacagcactggcaacatgggtgtgctggctggtcaggcctctcagttaaatgctgtggtcgacttgcaagacagaaataccgagctgtcttatcagcttttattagattctctgggtgacaggaccagatactttagtatgtggaactctgcggtggacagctatgatccagatgtcaggatcattgagaatcacggtgtggaggacgaacttccaaattattgcttcccattggatggtaccggtaccaatgccacataccaaggtgtggaaccagataatgctcaaggtcaaaatgataaatggaaaaaggacgagaaagtggctgctcaaaaccaaatttgcaagggcaatatttatgccatggagattaacctccaggccaacctgtggaagagttttctgtactcgaacgtggccttgtacctgcccgactccttcaagtacacgccggccaacgtcacgctgcccactaacaccaacacctacgagtacatgaacgggcgcgtggcggccccctcgctggtggacgcctacgtcaacattggcgcccgctggtcactggaccccatggacaacgttaacccctttaaccaccaccgcaatgcgggcctgcgctaccgctccatgctgctgggcaacgggcgctacgtgcccttccatattcaagtgccccaaaagttttttgccattaagaacctgcttctgctcccgggctcctacacctacgagtggaacttccgcaaggatgttaacatgattctgcagagttcccttggcaacgacctgcgcgtcgacggtgcctccgtccgcttcgacagtgttaacctttacgccacctttttccccatggcgcacaacaccgcctccaccctggaagccatgctgcgcaacgacaccaacgaccagtccttcaacgactacctctcagccgccaacatgctttaccccatcccagccaaggccaccaacgtgcccatttccatcccctcgcgcaactgggccgcctttcgcggctggagtttcacccgcctaaaaaccaaggaaactccctccctcggctcgggttttgacccctactttgtttactcgggcaccatcccctacctcgacgggaccttctacctgaaccacacctttaagaaggtctccatcatgttcgactcctcggttagctggcccggcaacgacaggctgcttacgccgaacgagtttgaaattaagcgcagcgtcgacggggagggctataacgtggcccaatgcaacatgaccaaggactggttcctggtccagatgctttcccactacaacattggctaccagggcttccatgtgcctgagggctacaaggaccgcatgtactccttctttcgcaacttccagcccatgagtaggcaggtggttgatgagattaactacaaggattacaaggccgttgccctgcccttccagcacaacaactcgggcttcaccggctacctcgcacctaccttgcgccagggacagccgtaccccgccaacttcccctacccgcttatcggacagaccgccgtgccctccgttacccagaaaaagtttctctgcgacagggtcatgtggcgcatccccttctccagcaacttcatgtctatgggcgcccttaccgacctgggtcaaaacatgctttacgccaactcggcgcacgcgctcgacatgacctttgaggtggaccccatggatgagcccaccctcctgtatcttctctttgaagttttcgacgtggtcagagtgcaccagccgcaccgcggcgtcatcgaggccgtctacctgcgcacgcccttctccgccggcaacgccaccacctaa

SEQ ID NO: 207 - DNA, 2817 bp, Adenovirus D9
  MISC_FEATURE (1)..(2817): Hexon Gene
atgatgccgcagtgggcgtacatgcacatcgccgggcaggacgcctcggagtacctgagcccgggtctggtgcagtttgcccgcgccaccgacacgtacttcagcctgggcaacaagtttaggaaccccacggtggccccgacccacgatgtgaccacggaccggtcccagcgtctgacgctgcgcttcgtgcccgtggatcgcgaggacaccacgtactcgtacaaggcgcgcttcactctggccgtgggcgacaaccgggtgctagacatggccagcacttactttgacatccgcggcgtcctggaccgcggtcccagcttcaaaccctactcgggcacagcttacaacagtctggcccccaagggtgcccccaactccagccagtggcttgcaaaagacaccaatgctggcgatcaagcattaaaaacccacacacatggcgtagctgctatggggggaacagatatcacagcaaagggtttgcaaattggtgttgacacgactgaaaacaagaatgagcctatttatgcaaatgaaatataccagccagaacctcaggtaggagaggaaaacttgcaagatgttgaaaacttttatggaggcagagctcttaaaaaagaaaccaaaatgaaaccttgctatggctcgtttgccagacccacaaatgaaaaaggcggtcaagccaaatttttaactgacggcgatggtcagctaactaaaaatcatgatatcacaatgaatttctttgacactcctggaggaacagttggtcaggatactgaacttgaagcagacattgttatgtatgctgagaatgtgcatctggaaactccagacacgcatgtggtgtacaaaccaggaacttctgatgagagttcagaagcaaatttggttcagcagtccatgccaaacaggcccaactacatcggcttcagggacaactttgtgggtctcatgtactataacagcactggcaacatgggtgtgctggctggtcaagcatctcagttgaatgctgtggtcgacttgcaagacagaaacacagagctgtcttaccagctcttgctagattctctgggtgacagaaccagatactttagcatgtggaactctgcagtggacagttatgatcctgatgtcaggattattgaaaatcacggtgtggaagatgaacttccaaactattgcttcccattggatggagctggcactaatgctacctaccaaggtgtaaaagttaaaaatggccaagatggagatgtaaacgcagattgggaaaaagatccaaatcttgcttcacgaaaccaaatatgcaagggtaacatcttcgccatggagatcaacctccaggccaacctgtggaagagttttctgtactcgaatgtggccctgtacctgcccgactcatacaagtacacgccggccaacgtcacgctgcccgccaataccaacacctacgagtacatgaacggccgcgtggtagccccctcgctggtggacgcctacatcaacatcggcgcccggtggtcgctggaccccatggacaacgtcaacccattcaaccaccaccgcaacgcgggcctgcgttaccgctccatgcttctgggcaacggccgctacgtgcccttccacatccaagtgccccaaaagttctttgccatcaagaacctgctcctgctccccggctcctacacctacgagtggaacttccgcaaggatgtcaacatgatcctgcagagttccctcggaaacgacctgcgcgtcgacggcgcctccgtccgcttcgacagcgtcaacctctacgccacattcttccccatggcgcacaacaccgcctccaccctggaagccatgctgcgcaacgacaccaacgaccagtccttcaacgactacctctcggccgccaacatgctctaccccatcccggccaaggccaccaacgtgcccatctccatcccctcgcgcaactgggccgccttccgcggctggagtttcacccggctcaagaccaaagaaactccctccctcggctcgggtttcgatccctactttgtatactcgggttccatcccctacctcgacgggaccttctacctcaaccacaccttcaagaaggtctccatcatgttcgactcctcggtcagctggcccggcaacgaccggctgctcacgccgaacgagttcgagatcaagcgcagtgtcgacggggagggctacaatgtggcccaatgcaacatgaccaaggactggttcctcgtccagatgctctcccactacaacatcggctaccagggcttccacgtgcccgagggctacaaggaccgcatgtactccttcttccgcaacttccagcccatgagcaggcaggtggtcgatgagatcaactacaaggactacaaggccgtcaccctgcccttccagcacaacaactcgggcttcaccggctaccttgcacccaccatgcgtcaggggcagccctaccccgccaacttcccctatcctctcatcggccagacagccgtgccctctgtcacccagaaaaagttcctctgcgacagggtcatgtggcgcatccccttctccagcaacttcatgtccatgggcgccctcaccgacctgggtcagaacatgctctatgccaactcggcccacgcgctcgacatgaccttcgaggtggaccccatggatgagcccaccctcctctatcttctcttcgaagttttcgacgtggtcagagtgcaccagccgcaccgcggcgtcatcgaggccgtctacctgcgcacgcccttctccgccggcaacgccaccacctaa

SEQ ID NO: 208 - DNA, 2880 bp, Adenovirus D10
  MISC_FEATURE (1)..(2880): Hexon Gene
atgtgccttaccgccagagaacgcgcgaagatggccaccccctcgatgatgccgcagtgggcgtacatgcacatcgccgggcaggacgcctcggagtacctgagcccgggtctggtgcagtttgcccgcgccaccgacacgtacttcagcctgggcaacaagtttaggaaccccacggtggccccgacccacgatgtgaccacggaccggtcccagcgtctgacgctgcgcttcgtgcccgtggatcgcgaggacaccacgtactcgtacaaggcgcgcttcactctggccgtgggcgacaaccgggtgctagacatggccagcacttactttgacatccgcggcgtcctggaccgcggtcccagcttcaaaccctactcgggcacagcttacaacagcctggcccccaagagcgcccccaatccaagtcagtggaccgccaatgaaaaacaaactggcggtcaaccaaaatctgttacccaaacatttggatctgctccaatgggaggcagcaatattactattgaaggattggttattggaactaaggaggaagaaggcaatgccactgaagaaatattcgcagataaaacattccagccagaacctcaagtaggagaagaaaactggcaggaaacagaagccttctatggaggaagggctcttaaaaaggataccaaaatgaaaccatgttacggttcatttgctagacccaccaatgaaaaaggagggcaagcaaaattaaagctcaacgatcagggtcagccaactaaagattatgacatagacctggcattctttgatactccgggcggaacacctccaacaggcagtggtcaacaggaagaatacaaagcagacattgttatgtacactgaaaatgtcaaccttgaaaccccagacacccacgtggtatataagccaggaaaagaggatgagagttctgaaacaaatttgacacagcagtccatgcccaacagacctaactacattggctttagggacaactttgtggggctcatgtattacaacagcaccggcaatatgggtgtgctggctggtcaggcttctcagttgaacgctgtggtcgacttgcaagacagaaataccgagctatcttaccagctattgctagattctttgggcgacaggaccagatactttagcatgtggaactctgcggtggacagctatgatcccgatgtcaggatcattgagaatcacggtgtggaagatgaacttccaaactattgcttcccattgaatggtactggcaccaattccacttatcaaggcgtaaaggtgaaaacaggtcaggatggagctgaggagaccgagtgggataaagatgaaactgttgcaagacaaaatcaaatcgccaagggcaacgtctatgccatggagatcaacctccaggccaacctgtggaagagttttctgtactcgaacgtagccctgtacctgcctgactcatacaagtacacgccggccaacgtcacgctgcccgccaataccaacacctacgagtacatgaacggccgcgtggtagccccctcgctggtggacgcctacatcaacatcggcgcccggtggtcgctggaccccatggacaacgtcaacccattcaaccaccaccgcaacgcgggcctgcgttaccgctccatgcttctgggcaacggccgctacgtgcccttccacatccaagtgccccaaaagttctttgccatcaagaacctgctcctgctccccggctcctacacctacgagtggaacttccgcaaggatgtcaacatgatcctgcagagttccctcggaaacgacctgcgcgtcgacggcgcctccgtccgcttcgacagcgtcaacctctacgccacattcttccccatggcgcacaacaccgcctccaccctggaagccatgctgcgcaacgacaccaacgaccagtccttcaacgactacctctcggccgccaacatgctctaccccatcccggccaaggccaccaacgtgcccatctccatcccctcgcgcaactgggccgccttccgcggctggagtttcacccggctcaagaccaaagaaactccctccctcggctcgggtttcgatccctactttgtatactcgggctccatcccctatctcgatgggaccttctacctcaaccacaccttcaagaaggtctccatcatgttcgactcctcggtcagctggcccggcaacgaccggctgctcacgccgaacgagttcgagatcaagcgcagtgtcgacggggagggctacaatgtggcccaatgcaacatgaccaaggactggttcctcgtccagatgctctcccactacaacatcggctaccagggcttccacgtgcccgagggctacaaggaccgcatgtactccttcttccgcaacttccagcccatgagcaggcaggtggtcgatgagatcaactacaaggactacaaggccgtcaccctgcccttccagcacaacaactcgggcttcaccggctacctcgcacccaccatgcgtcaggggcagccctatcccgccaacttcccctacccgctcatcggccagacagccgtgccctccgtcacccagaaaaagttcctctgcgacagggtgatgtggcgcatccccttctccagcaacttcatgtccatgggcgccctcaccgacctgggtcagaacatgctctacgccaactcggctcacgcgctcgacatgaccttcgaggtggaccccatggatgagcccaccctcctctatcttctctttgaagttttcgacgtggtcagagtgcaccagccgcaccgcggcgtcatcgaggccgtctacctgcgcacgcccttctccgccggcaacgccaccacctaa

SEQ ID NO: 209 - DNA, 2820 bp, Adenovirus D13
  MISC_FEATURE (1)..(2820): Hexon Gene
atggccaccccctcgatgatgccgcagtgggcgtacatgcacatcgccgggcaggacgcctcggagtacctgagcccgggtctggtgcagtttgcccgcgccaccgacacgtacttcagcctgggcaacaagtttaggaaccccacggtggccccgacccacgatgtgaccacggaccggtcccagcgtctgacgctgcgcttcgtgcccgtggatcgcgaggacaccacgtactcgtacaaggcgcgcttcactctggccgtgggcgacaaccgggtgctagacatggccagcacgtactttgacatccgcggcgtcctggaccgcggtcccagcttcaaaccctactcgggcacggcttacaacagcctggcccccaagggcgcccccaatcccagtcagtggactactaaagaaaagcagaccggagtaaatgcaggagacaaagaagttaccaagacatttggaattgccgccatgggaggcagtaatatttctgaaaacggtttgcagattggaactgacacaacagcagatggcacaaaaccaatatatgcagacaaaactttccagccagaacctcaagttggagaagaaaactggcaggataatgatgaatattatggaggcagggctcttaaaaaagataccaaaatgaagccatgctatggttcatttgctaaacccacaaacaaggaaggagggcaggctaaattgaaagaaacacccaatggcgctgatcctcaatatgatgtggacatggctttctttgactcaacaactataaacattccagatgtagtgttgtacactgaaaatgtagacttggaaactccagacacacatgtggtgtacaaaccaggcaaagaggatgacagttcagaagtaaacttaactcagcagtccatgcctaacagacccaactacattggcttcagagacaactttgtggggctcatgtactacaacagcactggcaacatgggtgtgctggctggtcaggcttctcagttgaatgctgtggttgacttgcaagacagaaacaccgaactgtcttaccagctcttgctagattctctgggtgacagaacaagatactttagcatgtggaactctgcggtggacagttatgatcccgatgtcaggatcattgaaaatcacggtgtggaagatgaacttccaaactactgcttccccttggacggtattcaaactaattcagcctaccaaggtgttaaactaaaggataatccaacaggaggcggagctaatggagattgggtaaaggatgataccatttcagcccataatcaaattgggaagggcaacatctttgccatggagatcaacctccaggccaacctctggaagagttttctgtactcgaacgtggccttgtacctgcccgactcctacaagtacacgccggccaacgtcacgctgcccgccaacaccaacacctacgagtacatgaacggccgcgtggtagccccctcgctggtggacgcctacatcaacatcggcgcccgctggtcgttggaccccatggacaacgtcaaccccttcaaccaccaccgcaacgcgggcctgcgctaccgctccatgcttctgggcaacggccgctacgtgcccttccacatccaagtgccccaaaagttctttgccatcaagaacctgctcctgcttcccggctcctacacctacgagtggaacttccgcaaggatgtcaacatgatcctgcagagttccctcggcaacgacctgcgcgtcgacggcgcctccgtccgcttcgacagcgtcaacctctacgccaccttcttccccatggcgcacaacaccgcctccaccctggaagccatgctgcgcaacgacaccaacgaccagtccttcaacgactacctctcggccgccaacatgctctaccccatcccggccaaggccaccaacgtgcccatctccatcccctcgcgcaactgggccgccttccgcggctggagtttcactcgtctgaagaccaaggaaactccctctctcggttcgggtttcgacccctactttgtctactcgggctccattccctacctcgacgggaccttctacctcaaccacaccttcaagaaggtctccatcatgttcgactcctcggtcagctggcccggcaacgaccggctgctcacgccgaacgagttcgagatcaagcgcagcgtcgacggggagggctacaacgtggcccaatgcaacatgaccaaggactggttcctcgtccagatgctctcccactacaacatcggctaccagggcttccacgtgcccgagggctacaaggaccgcatgtactccttcttccgcaacttccagcccatgagcaggcaggtggtcgatgaaatcaactacaaggactacaaggccgtcaccctgcccttccagcacaacaactcgggcttcaccggctacctggcccccaccatgcgtcaggggcagccctaccccgccaacttcccctacccgctcatcggctccaccgcagtcccctccgtcacccagaaaaagttcctctgcgacagggtcatgtggcgcatccccttctccagcaacttcatgtccatgggcgccctcaccgacctgggtcagaacatgctctatgccaactcggcccacgcgctcgacatgaccttcgaggtggaccccatggatgagcccaccctcctctatcttctcttcgaagttttcgacgtggtcagagtgcaccagccgcaccgcggcgtcatcgaggccgtctacctgcgcacgcccttctccgccggcaacgccaccacctaa

SEQ ID NO: 210 - DNA, 2865 bp, Adenovirus D17
  MISC_FEATURE (1)..(2865): Hexon Gene
atgtgccttaccgccagagaacgcgcgaagatggccaccccctcgatgatgccgcagtgggcgtacatgcacatcgccgggcaggacgcctcggagtacctgagcccgggtctggtgcagtttgcccgcgccaccgacacgtacttcagcctgggcaacaagtttaggaaccccacggtggccccgacccacgatgtgaccacggaccggtcccagcgtctgacgctgcgctttgtgcccgtggatcgcgaggacaccacgtactcgtacaaggcgcgcttcactctggccgtgggcgacaaccgggtgctagacatggccagcacgtactttgacatccgcggcgtcctggaccgcggtcccagtttcaaaccctactcgggcacggcttacaacagccttgcccccaagggcgctcccaatcccagtcagtgggttgccaaagaaaatggtcagggaactgataagacacatacttatggctcagctgccatgggaggaagcaacatcaccattgaaggtttagtaattggaactgatgaaaaagctgaggatggcaaaaaagatatttttgcaaataaactttatcagccagaacctcaagtaggtgaagaaaactggcaagagtctgaagccttctatggaggcagagctcttaagaaagacacaaaaatgaagccctgctatggctcatttgcaagacctaccaatgaaaaaggcggacaagctaaatttaagccagtggaagaggggcagcaacctaaagattatgacatagatttggctttctttgacacacctggaggcaccatcacaggaggcacagacgaagaatataaagcagacattgtgttgtacactgaaaatgtcaaccttgaaaccccagacacccacgtggtatacaagccaggaaaagaggatgacagttcagaagtaaatttgacacagcagtccatgcccaacaggcctaactacattggcttcagagacaactttgtgggactcatgtactacaacagtactggcaacatgggtgtgctggctggtcaggcctctcaattgaatgctgtggtcgacttgcaagacagaaacaccgagctgtcttaccagctcttgctagattctctgggtgacagaaccagatacttcagcatgtggaactctgcggtggatagctatgatccagatgtcaggatcattgaaaatcatggtgtggaagatgaacttccaaactattgcttcccattgaatggcactggcaccaattcaacatatcttggcgtaaaggtgaaaccagatcaagatggtgatgttgaaagcgagtgggataaagatgataccattgcaaggcagaatcaaatcgccaagggcaacgtctttgccatggagatcaacctccaggccaacctgtggaagagttttctgtactcgaacgtggccttgtacctgcccgactcctacaagtacacgccggccaatgttacgctgcccgccaacaccaacacctacgagtacatgaacggccgcgtggtagccccctcgctggtggacgcctacatcaacataggcgcccgatggtcgctggaccccatggacaacgtcaaccccttcaaccaccaccgcaatgcgggcctgcgctaccgctccatgcttctgggcaacggccgctacgtgcccttccacatccaagtgccccaaaagttctttgccatcaagaacctgctcctgctcccgggctcctacacctacgagtggaacttccgcaaggatgtcaacatgatcctgcagagttccctcggcaacgacctgcgcgtcgacggcgcctccgtccgcttcgacagcgtcaacctctacgccaccttcttccccatggcgcacaacaccgcctccaccctggaagccatgctgcgcaacgacaccaacgaccagtccttcaacgactacctctcggccgccaacatgctctaccccatcccggccaaggccaccaacgtgcccatctccatcccctcgcgcaactgggccgcttttcgcggctggagtttcacccgtctgaaaaccaaggaaactccctccctcggctcgggttttgacccctactttgtctactcgggctcgatcccctaccttgacgggaccttttaccttaaccacaccttcaagaaggtctccatcatgttcgactcctcggtcagctggcccggcaacgaccggctgctcacgccgaacgagttcgagatcaagcgcagcgtcgacggggagggctacaacgtggcccaatgcaacatgaccaaggactggttcctcgtccagatgctctcccactacaacatcggctaccagggcttccacgtgcccgagggctacaaggaccgcatgtactccttcttccgcaacttccagcccatgagcaggcaggtggtcgatgagatcaactacaaggactacaaggccgtcaccctgcccttccagcacaacaactcgggcttcaccggctaccttgcacccaccatgcgccaagggcagccctaccccgccaacttcccctacccgctcatcggccagacagccgtgccatccgtcacccagaaaaagttcctctgcgacagggtcatgtggcgcatccccttctccagcaacttcatgtccatgggcgccctcaccgacctgggtcagaacatgctctacgccaactcggcccacgcgctcgacatgaccttcgaggtggaccccatggatgagcccaccctcctctatcttctcttcgaagttttcgacgtggtcagagtgcaccagccgcaccgcggcgtcatcgaggccgtctacctgcgcacgcccttctccgccggaaacgccaccacctaa

SEQ ID NO: 211 - DNA, 2817 bp, Adenovirus D20
  MISC_FEATURE (1)..(2817): Hexon Gene
atgatgccgcagtgggcgtacatgcacatcgccgggcaggacgcctcggagtacctgagcccgggtttggtgcagtttgcccgcgccaccgacacgtacttcagcctgggcaacaagtttaggaaccccacggtggctcccacccacgatgtgaccacggaccggtcccagcgtctgacgctgcgctttgtgcccgtggatcgcgaggacaccacgtactcgtacaaggcgcgcttcactctggccgtgggcgacaaccgggtgctagacatggccagcacttactttgacatccgcggcgtcctggaccgcggtcccagcttcaaaccctactcgggcacggcctacaacagcctggctcccaagggcgcccccaactccagtcagtggcttgcaaaagataccaatgctgctggtcaaccagataaaactcacacctatggcgttgcagccatgggtggagaagacattacagaaaagggtcttcaaattggcattgatgaaactaaagaagaaaataacaagatatttgccaatgaaatataccaaccagaacctcaagtgggagaagaaaactggcaggaaacatttgttttttatggcggtagagctcttaagaaggataccaaaatgaaaccatgctatggctcatttgccagacctactaatgaaaagggaggtcaggctaaatttgtacttgatcaggaaggaaagccaactaaaaatcatgacatcacaatggctttctttgatactcctggtgggcaattaaatggaaaagatgaacttaaggcagacattgtcatgtacactgaaaatgtcaacctggaaacacctgacacccatgttgtttacaaacctggaaaagaggatgacagttcagaaatcaatttggttcaacagtccatgcccaacagacccaactacattggcttcagggacaactttgtagggcttatgtattacaacagcactggcaacatgggtgtgctggcaggtcaggcctctcagttgaatgctgtggtagacttgcaagacagaaacacagagctgtcttaccagctcttgctagattcgctgggtgacagaaccagatactttagcatgtggaactctgcggtggacagctatgatccagatgtcaggatcattgagaatcatggtgtggaagatgaacttccaaactattgcttcccattggatggtgctggaactaatgcagtttaccaaggtgtaaaaattacagatggaaatgatggcgatgtcaatgatgactgggaaaaagacaccgcagtatctgaacgtaatcagatatgcaaaggcaatatctatgctatggagatcaacctccaggccaacctgtggaagagttttctgtactcgaacgtggccctgtacctgcccgactcctacaagtacacgccggccaacgtcacgctgcccgccaacaccaacacctacgagtacatgaacggccgcgtggtagccccctcgctagtggacgcctacatcaacatcggcgcccgctggtcgctagaccccatggacaatgtcaaccccttcaaccaccaccgcaatgcgggcctgcgctaccgttccatgcttctgggcaatggccgctacgtgcccttccacatccaagtgccccaaaagttctttgccatcaagaacctgctcctgctccccggctcttacacctacgagtggaactttcgcaaggacgtcaacatgatcctgcagagttccctcggaaacgacctgcgcgtcgacggcgcctccgtccgcttcgacagcgtcaacctctacgccaccttcttccccatggcgcacaataccgcctccaccctggaagccatgctgcgcaacgacaccaacgaccagtccttcaacgactacctctcggcagccaacatgctttaccccatcccggccaaggccaccaacgtgcccatttccatcccctcgcgcaactgggccgccttccgcggctggagtttcacccggctcaagaccaaggaaactccatcccttggctcgggtttcgacccctactttgtctactcgggctccatcccctacctcgacgggaccttctacctcaaccacaccttcaaaaaggtctccatcatgtttgactcctcggtcagctggcccggcaacgaccggctgctcacgccgaacgagttcgagatcaagcgcagcgtcgacggggagggctacaacgtggcccaatgcaacatgaccaaggactggttcctcgtccagatgctctcccattacaacatcggttaccagggcttccatgtgcccgagggctacaaggaccgcatgtactccttcttccgcaacttccagcccatgagcaggcaggtggtcgatgagatcaactacaaggactacaaggccgtcaccctgccattccagcacaacaactctggcttcaccggctacctcgcacccaccatgcgtcaggggcagccctaccccgccaacttcccctacccgctcatcggccagacagccgtgccatccgtcacccagaaaaagttcctctgcgacagagtcatgtggcgcatccccttctccagcaacttcatgtccatgggcgcccttaccgacctgggtcagaacatgctctacgccaactcggcccacgcgctcgacatgacctttgaggtggaccccatggatgagcccaccctcctctatcttctcttcgaagttttcgacgtggtcagagtgcaccagccgcaccgcggcgtcatcgaggccgtctacctgcgcacgcccttctccgccggcaacgccaccacctaa

SEQ ID NO: 212 - DNA, 2775 bp, Adenovirus D24
  MISC_FEATURE (1)..(2775): Hexon Gene
atgcacatcgccgggcaggacgcctcggagtacctgagcccgggtctggtgcagtttgcccgcgccaccgacacgtacttcagcctgggcaacaagtttaggaaccccacggtggctcccacccacgatgtgaccacggaccggtcccagcgtctgacgctgcgctttgtgcccgtggatcgcgaggacaccacgtactcgtacaaggcgcgcttcactctggccgtgggcgacaaccgggtgctagacatggccagcacttactttgacatccgcggcgtcctggaccgcggtcccagcttcaaaccctactcgggcacggcttacaacagcctggcccccaaaggcgcccccaactctagtcagtgggaacaagctaaagctaccaatgccggtcaaaaggaaactcacacatttggagtagccgctatgggcggagaagacattacagtgaaaggtcttcaaattggaactgatgaaactaaggaagatggagaggatgaaatttttgcagatcaaacattccagccagaacctcaagtgggagaacagaactggcaagaaacgtttgttttctatggaggcagagctcttaagaaagaaaccaaaatgaagccatgttatggctcttatgcgagacccacaaatgaaaagggaggacaggctaaatttacacttgatgaaaaaggtcagccaaccaaaattcctgatattacaatggatttctttgatagtccacaagatgatacatcaggtgtaactaataagccagatattgtcatgtatgcagaaaatgtaaatttagaagctcctgacacacatgtagtttacaaaccaggcaaagatgattctagttcttccgctaacctcacacaacaggccatgcctaacagaccgaactacatcgggttcagagacaactttgtgggtcttatgtactacaatagtactggcaacatgggtgtgctggctggtcaggcctctcagttgaatgctgtggtcgacttgcaagacagaaacaccgagctgtcttaccagctattgctagattctctgggtgacagaaccagatactttagcatgtggaattctgcagtggacagctatgaccccgatgtcaggatcattgagaatcacggtgtggaagatgaacttccaaactattgcttcccactgaatggcagtggttctaacagcacatacaaaggtgttaaagctggaactggaaacaattgggatgacgatgaaaatgttgcaagacaaaatcagattggcactggcaacctgttcgccatggagatcaacctccaggccaacctatggaagagttttctgtactcgaacgtggccctgtacctgcccgactcctacaagtacacgccggccaacgtcacgctgcccaccaacaccaacacctacgactacatgaacggccgcgtggtagccccctcgctggtggacgcctacatcaacattggcgcccgctggtcgctggaccccatggacaatgtcaatcccttcaaccaccaccgcaacgcgggcctgcgctaccgctccatgctcctgggcaacggccgctacgtgcccttccacatccaagtgccccaaaagttctttgccatcaagaacctgcttctgctccccggttcctacacctacgagtggaacttccgcaaggacgtcaacatgatcctgcagagttccctcggcaacgacctgcgcgtcgacggcgcctccgtccgcttcgacagcgtcaacctctacgccaccttcttccccatggcgcacaacaccgcctccaccctggaagccatgctgcgcaacgacaccaacgaccagtccttcaacgactacctctcggccgccaacatgctctaccccatcccggccaaggccaccaacgtgcccatctccatcccctcgcgcaactgggccgccttccgcggctggagtttcacccggctcaagaccaaggaaactccctccctcggctcgggtttcgacccctactttgtctactcgggctccatcccctacctcgacgggaccttctacctcaaccacaccttcaagaaggtctccatcatgttcgactcctcggtcagctggcccggcaacgaccggctgctcacgccgaacgagttcgagatcaagcgcagcgttgacggggagggctacaacgtggcccaatgcaacatgaccaaggactggttcctcgtccagatgctctcccactacaacatcggctaccagggcttccacgtgcccgagggctacaaggaccgcatgtactccttcttccgcaacttccagcccatgagcaggcaggtggtcgatgagatcaactacaaggactacaaggccgtcaccctacccttccagcacaacaactcgggcttcaccggctaccttgcgcccaccatgcgccaggggcagccctaccccgccaacttcccctacccgctcatcggctccaccgcagttccctccgtcacccagaaaaagttcctctgcgacagggtcatgtggcgcatcccattctccagcaactttatgtccatgggcgccctcaccgacctgggtcagaacatgctctatgccaactcggcccacgcgctcgacatgacctttgaggtggaccccatggatgagcccaccctcctctatcttctcttcgaagttttcgacgtggtcagagtgcaccagccgcaccgcggcgtcatcgaggccgtctacctgcgcacgcccttctccgccggcaacgctaccacttaa

SEQ ID NO: 213 - DNA, 2838 bp, Adenovirus D25
  MISC_FEATURE (1)..(2838): Hexon Gene
atggccaccccatcgatgatgccgcagtgggcgtacatgcacatcgccgggcaggacgcctcggagtacctgagcccgggtctggtgcagtttgcccgcgccaccgacacgtacttcagcctgggcaacaagtttaggaaccccacggtggctcccacccacgatgtgaccacggaccggtcccagcgtctgacgctgcgcttcgtgcccgtggatcgcgaggacaccacgtactcgtacaaggcgcgcttcactctggccgtgggcgacaaccgggtgctagacatggccagcacttactttgacatccgcggcgtcctggaccgcggtcccagcttcaaaccctactcgggcacagcttacaacagcctggcccccaagggcgctcccaattccagtcagtgggaagaaaaaaagagtggagccggaaatcaaaccgaaactcatacgtttggcgttgctcccatgggcggaactaacatcacaattagcggtttgcaaattggaactgaggaagaagatggaaatcctacaaaggagatttttgcagataaaacattccagcctgaacctcaaataggagaagaaaactggcaggacactgagaatttttatggcggtagagctcttaagaaagacaccaaaatgaaaccttgctatggctcttttgccagacctactaacgaaaagggaggtcaagctaagttaaaacttgacgcccaaggtcagtcaactaaagattatgacattgacctggctttctttgactcacctggaggaaatacaacagctggtggtcaagaagagcttaaagcagacattgtcatgtacactgagaatgcttatctggaaacaccagatacccatgtagtttacaagccaggaacctctgatgacagttctgccgccaacttggttcagcaatccatgcccaacagacccaactacattggcttcagagacaactttgtgggtctcatgtattacaacagcactggcaacatgggtgtgctggctggtcaggcctctcagttgaatgccgtggtcgacttacaagacagaaacaccgagctgtcttaccagctcttgctagattctctgggcgacagaaccaggtactttagcatgtggaactctgcggtggacagctatgatcccgacgtcaggatcattgaaaatcacggtgtggaagatgaacttccaaactattgcttcccattggatggctctggcactaattcagcttatcaaggtgttaaagttaaaaatggggaagatggtgatattgagagcgaatgggaaaaagacaccaatgtcgcagctcgtaaccaactgtgcaagggtaacatctttgccatggagatcaacctccaggccaacctgtggaagagttttctgtactcgaacgtggccctgtacctgcccgactcatacaagtacacgccggccaacgtcaagctgcccaccaacaccaacacctacgagtacatgaacggccgcgtggtagccccctcactggtggacgcctacgtcaacatcggcgcccgctggtcgctggaccccatggacaacgtcaaccccttcaaccaccaccgcaatgcgggcctgcgctaccgctccatgcttctgggcaacggccgctacgtgcccttccacatccaagtgccccaaaagttctttgccatcaagaacctgctcctgctccccggctcctacacctacgagtggaacttccgcaaggacgtcaacatgatcctgcagagttccctcggaaacgacctgcgcgtcgacggcgcctccgtccgcttcgacagcatcaacctctacgccaccttcttccccatggcgcacaacaccgcctccaccctggaagccatgctgcgcaacgacaccaacgaccagtccttcaacgactacctctcggccgccaacatgctctaccccatcccggccaaggccaccaacgtgcccatctccatcccctcgcgcaactgggccgccttccgcggctggagtttcacccggctcaagaccaaggaaactccctccctcggctcgggtttcgacccctactttgtctactcgggctccatcccctacctcgacgggaccttctacctcaaccacaccttcaagaaggtttccatcatgttcgactcctcggtcagctggcccggcaacgaccggctgctcacgccgaacgagttcgagatcaagcgcagcgtcgacggggagggctacaacgtggcccaatgcaacatgaccaaggactggttcctcgtccagatgctctcccactacaacatcggctaccagggcttccacgtgcccgagggctacaaggaccgcatgtactccttcttccgcaacttccagcccatgagcaggcaggtggtcgatgagatcaactacaaggactacaaggccgtcaccctgcccttccagcacaacaactcgggcttcaccggctaccttgcacccaccatgcgtcaggggcagccctaccccgccaacttcccctacccgctcatcggctccaccgcagtcccctccgtcacccagaaaaagttcctctgcgacagggtcatgtggcgcatccccttctccagcaacttcatgtccatgggcgccctcaccgacctgggtcagaacatgctctacgccaactcggcccacgcgctcgacatgactttcgaggtggaccccatggatgagcccaccctcctctatcttctcttcgaagttttcgacgtggtcagagtgcaccagccgcaccgcggcgtcatcgaggccgtctacctgcgcacacccttctccgccggcaacgccaccacctaa

SEQ ID NO: 214 - DNA, 2889 bp, Adenovirus D26
  MISC_FEATURE (1)..(2889): Hexon Gene
atgtgccttaccgccagagaacgcgcgaagatggccaccccctcgatgatgccgcagtgggcgtacatgcacatcgccgggcaggacgcctcggagtacctgagcccgggtctggtgcagtttgcccgcgccaccgacacgtacttcagcctgggcaacaagtttaggaaccccacggtggccccgacccacgatgtgaccacggaccggtcccagcgtctgacgctgcgcttcgtgcccgtggatcgcgaggacaccacgtactcgtacaaggcgcgcttcactctggccgtgggcgacaaccgggtgctagacatggccagcacttactttgacatccgcggcgtcctggaccgcggtcccagcttcaaaccctactcgggcacggcctacaacagcctggctcccaagggtgcccccaatcccagtcagtgggaaacaaaagaaaagcaaggaactactggaggagtgcagcaagaaaaagatgtcacaaaaacatttggtgtggctgccaccggcggaattaatataacaaaccagggtctgttactaggaactgacgaaaccgctgagaatggcaaaaaagacatttatgcagacaagactttccagccagaacctcaagttggagaagaaaactggcaggaaaatgaagccttctatggaggaagggctcttaaaaaggacactaaaatgaaaccatgctatggatcttttgctagacctactaatgagaaaggaggtcaggcaaagttcaaaccagttaatgaaggagaacaacctaaagatctggatatagattttgcttactttgacgtccctggcggaagtcctccagcaggtggtagtggggaagaatacaaagcagatataattttgtacactgaaaatgttaatcttgaaacaccagacactcatgtggtttacaagccaggaacttcagataacagttcagaaatcaatctggttcagcagtccatgccaaacagacccaactacattggctttagggacaactttgtaggtctcatgtattacaacagcaccggaaatatgggtgtgctggctggtcaggcttctcagttgaacgctgtggtcgacttgcaagacagaaacaccgagttatcttaccagctattgctagattctctgggtgacagaaccagatactttagcatgtggaactctgcggtggacagttacgatccagatgtcaggatcattgaaaatcacggtgtggaagatgaacttccaaactattgcttcccattgaatggcactggaaccaattccacttatcaaggtgtaaagattacaaatggtaatgatggtgctgaagaaagtgagtgggagaaagacgatgcaatttctagacaaaaccaaatctgcaagggcaatgtctacgccatggagatcaacctgcaggccaacctgtggaagagttttctgtactcgaacgtggccctgtacctgcccgactcctacaagtacacgccggccaacgtcaagctgcccgccaacaccaacacctacgagtacatgaacggccgcgtggtagccccctcgctggtggacgcctacatcaacatcggcgcccgctggtcgttggaccccatggacaacgtcaaccccttcaaccaccaccgcaatgcgggcctgcgctaccgctccatgctgctgggcaacggccgctacgtgcccttccacatccaagtgccccaaaagttctttgccatcaagaacctgctcctgctcccgggctcctacacctacgagtggaacttccgcaaggacgtcaacatgatcctgcagagttccctcggcaacgacctgcgcgtcgacggcgcctccgtccgcttcgacagcgtcaacctatacgccactttcttccccatggcgcacaacaccgcttcaaccttggaagccatgctgcgcaacgacaccaacgaccagtccttcaacgactacctctcggccgccaacatgctctaccccatcccggccaaggccaccaacgtgcccatctccatcccatcgcgcaactgggccgccttccgcggctggagtttcacccggctcaagaccaaggaaactccttccctcggctcgggtttcgacccctactttgtctactcgggctccatcccctacctcgacgggaccttctacctcaaccacaccttcaagaaggtctccatcatgttcgactcctcggtcagctggcccggcaacgaccggctgctcacgccgaacgagttcgagatcaagcgcagcgtcgacggggagggctacaacgtggcccaatgcaacatgaccaaggactggttcctcgtccagatgctctcccactacaacatcggctaccagggcttccacgtgcccgagggctacaaggaccgcatgtactccttcttccgcaacttccagcccatgagcaggcaggtggtcgatgagatcaactacaaggactacaaggccgtcaccctgcccttccagcacaataactcgggcttcaccggctacctcgcacccaccatgcgccaggggcagccctaccccgccaacttcccctacccgctcatcggtcagacagccgtgccctccgtcacccagaaaaagttcctctgcgacagggtcatgtggcgcatccccttctccagcaacttcatgtccatgggcgccctcaccgacctgggtcagaacatgctctacgccaactcggcccacgcgctcgacatgaccttcgaggtggaccccatggatgagcccaccctcctctatcttctcttcgaagttttcgacgtggtcagagtacaccagccgcaccgcggcgtcatcgaggccgtctacctgcgcacgcccttctccgccggcaacgccaccacctaa

SEQ ID NO: 215 - DNA, 2841 bp, Adenovirus D27
  MISC_FEATURE (1)..(2841): Hexon Gene
atgtgccttaccgccagagaacgcgcgaagatggccaccccctcgatgatgccgcagtgggcgtacatgcacatcgccgggcaggacgcctcggagtacctgagcccgggtctggtgcagtttgcccgcgccaccgacacgtacttcagcctgggcaacaagtttaggaaccccacggtggctcccacccacgatgtgaccacggaccggtcccagcgtctgacgctgcgctttgtgcccgtggatcgcgaggacaccacgtactcatacaaggcgcgcttcactctggccgtgggcgacaaccgggtgctagacatggccagcacgtactttgatatccgcggcgtcctggaccgcggtcccagcttcaaaccctactcgggcacggcttacaacagcctggctcccaagggcgcccccaactccagtcagtggactgctaaagaaaatcaaaaagatgttacaaaaacatttggtgtagctccaatgggaggaattaatatatcaaaggatggtttacaaattggcgttgaagaaacagttgacaagcaagaaaaggaaatttatgctgacaagagtttccagccagaacctcaagtaggagaagaaaactggcaagagtcagaagccttctatggcggcagagctcttaagaaggacaccaagatgaaaccatgctatggttcatttgccagacccactaatgaaaagggaggtcaggcaaaattcaaagcacctgctgtcgaaggagaacagcctaaggaacttgatattgactttgctttctttgacactgactcaggtgacacagaatataaagcagatattgttatgtatgctgaaaacgtgaatctggaaactccagacactcatgttgtttacaaaccaggcaaagaggatgatagctctgaagcaaacttggttcagcagtccatgccaaacagaccaaactacattggctttagagacaattttgtggggctcatgtattacaacagcactggtaacatgggtgtgctggctggtcaggcctctcagttgaatgctgtggtcgacttgcaagacagaaacacagagctgtcttaccagctattgctagattctctgggtgacagaaccaggtactttagcatgtggaactctgcggtggacagctatgatcccgatgtcaggatcattgaaaatcatggtgtggaagatgaacttccaaactattgcttcccattggatggctctggaactaattccacatatcaaggtgtaaaaattacagatggaaatggtgctttgcaaaacggatgggcaaaagatgatgcaatctcgagacaaaaccaaatctgcaagggcaacatctacgccatggagatcaacctccaggccaacctgtggaagagttttctgtactcgaacgtggccctgtacctgcccgactctttcaagtacacgccggccaacgtcactctgcccaccaacaccaacacctacgagtacatgaacggccgcgtggtggccccctcgctggtggacgcctacatcaacatcggcgcccgctggtcgctggaccccatggacaatgtcaaccccttcaaccaccaccgcaacgcgggcctgcgctaccgctccatgttgctaggcaacggccgctacgtgcccttccatatccaagtgccccaaaagttctttgccatcaagaacctgctcctactcccgggctcctacacctacgagtggaacttccgcaaggacgtcaacatgatcctgcagagttccctcggcaacgacctgcgcgtcgacggcgcctccgtgcgcttcgacagcgtcaacctctacgccaccttcttccccatggcgcacaacaccgcctccaccctggaagccatgctgcgcaacgacaccaacgaccagtccttcaacgactacctctcggccgccaacatgctctaccccatcccggccaaggccaccaacgtgcccatctccatcccctcgcgcaactgggccgccttccgcggctggagtttcactcgcctgaaaaccaaggaaactccctcgctcggctcgggtttcgacccctactttgtctactcgggctccattccctacctcgacgggaccttctacctaaaccacaccttcaagaaggtctccatcatgttcgactcctcggtcagctggcccggcaacgaccggctgctcacgccgaacgagttcgaaatcaagcgcagcgtcgacggggagggctacaacgtggcccaatgcaacatgaccaaggactggttcctcgtccagatgctctcccactacaacatcggctaccagggcttccacgtgcccgagggctacaaggaccgcatgtattccttcttccgcaacttccagcccatgagcaggcaggtggtcgatgagatcaactacaaggactacaaggccgtcaccctgcccttccagcacaacaactcgggcttcaccggctacctcgcacccaccatgcgtcaggggcagccctatcccgccaacttcccctacccgctcatcggctccaccgcagtgccctccgtcacccagaaaaagttcctctgcgacagggtcatgtggcgcatccccttctccagcaacttcatgtccatgggcgcccttaccgacctgggtcagaacatgctctacgccaactcggctcacgcgctcgacatgaccttcgaggtggaccccatggatgagcccaccctcctctatcttctctttgaagttttcgacgtggtcagagtgcaccagccgcaccgcggcgtcatcgaggccgtctacctgcgcacgcccttctccgccggcaacgccaccacctaa

SEQ ID NO: 216 - DNA, 2862 bp, Adenovirus D33
  MISC_FEATURE (1)..(2862): Hexon Gene
atgtgccttaccgccagagaacgcgcgaagatggccaccccctcgatgatgccgcagtgggcgtacatgcacatcgccgggcaggacgcctcggagtacctgagcccgggtctggtgcagtttgcccgcgccaccgacacgtacttcagcctgggcaacaagtttaggaaccccacggtggccccgacccacgatgtgaccacggaccggtcccagcgtctgacgctgcgcttcgtgcccgtggatcgcgaggacaccacgtactcgtacaaggcgcgcttcactctggccgtgggcgacaaccgggtgctagacatggccagcacttactttgacatccgcggcgtcctcgaccgcggtcccagcttcaaaccctactcgggcacggcttacaacagcctggcccccaagggcgcccccaattccagtcagtgggaacagaaaaaggccactgggggagctgatgcaaaggaaacacatacattcggtgtagccgctatgggaggattgaacattacagacaaaggtttgcaaattggaatagatgaagataatgtagatggagatgatgagatatatgctgacaaaacttttcaaccagaacctcaagtgggagaggaaaactggaaagaaagttttaatttctatggaggcagagctattaagaaagacaccaaaatgaagccatgctatggttcctatgccagacccaccaatgttaagggaggtcaggctaaacttaaaactggagaagatatagaccctaacaaggactttgacatagacatggctttctttgatctaaagcaagctgacacaggaggtaataacaatcaagcagacgtggttatgtataccgaaaatattcatctggaaactccagacactcatgtggtgtacaagccaggcaaggaagatgcaagttctgaaattaacttgactcagcagtccatggccaacagacccaactacattggcttcagagacaactttgtagggctcatgtactacaacagcactggcaacatgggtgtgctggccggtcaggcatctcagttgaatgcagtggtcgacttgcaagacagaaacaccgagctgtcttaccagctcttgctagattctctgggcgacagaaccagatactttagcatgtggaactctgctgtggacagctatgatcccgatgtcaggatcattgagaatcacggtgtggaagatgaacttccaaactattgcttcccattggacggatctggcagcagtactgcttttcagggagttaaagtaaaaaccccggctggtactggtcaaaacactgtatgggaagttaacaatgatgctgcaacgcataaccaaattgcaagaggcgacctgtacgccatggagatcaacctccaggccaacctgtggaagagttttctgtactcgaacgtggccctgtacctgcccgactcctacaagtacactccggccaatgtcacgctgcccaccaacaccaacacctacgagtacatgaacggccgcgtggtggccccctcgctggtggacgcctacatcaacatcggcgcccgctggtcgctggaccccatggacaacgtcaaccccttcaaccaccaccgcaacgcgggcctgcgctaccgctccatgcttctgggcaacggccgctacgtgcccttccacatccaagtgccccaaaagttctttgccatcaagaacctgctcctgctcccgggctcctacacctacgagtggaacttccgcaaggatgtcaacatgatcctgcagagttccctcggcaacgacctgcgcgtcgacggcgcctccgtccgcttcgacagcgtcaacctctacgccaccttcttccccatggcacacaacaccgcctccaccctggaagccatgctgcgcaacgacaccaacgaccagtccttcaacgactacctctcggccgccaacatgctctaccccatcccggccaaggccaccaacgtgcccatctccatcccctcgcgcaactgggccgccttccgcggctggagtttcacccggctcaagaccaaggaaactccctccctcggctcgggtttcgacccctactttgtatactcgggctccatcccctaccttgacgggaccttctacctcaaccacaccttcaagaaggtctccatcatgttcgactcctcggtcagctggccaggcaacgaccggctgctcacgccgaacgagttcgagatcaagcgcagcgtcgacggggagggctacaacgtggcccaatgcaacatgaccaaggactggttcctcgtccagatgctctcccactacaacatcggttaccagggcttccatgtgcccgagggctacaaggaccgcatgtactccttcttccgcaacttccagcccatgagcaggcaggtggtcgatgagatcaactacaaggactacaaggccgtcaccctgcccttccagcacaacaactcgggcttcaccggctacctcgcgcccaccatgcgccaggggcagccctaccccgccaacttcccctacccgctcatcggctccaccgccgtgccctccgtcacccagaaaaagttcctctgcgacagggtcatgtggcgcatccccttctccagcaacttcatgtccatgggcgccctcaccgacctgggtcagaacatgctctatgccaactcggcccacgcgctcgacatgaccttcgaggtggaccccatggatgagcccaccctcctctatcttctcttcgaagttttcgacgtggtcagagtgcaccagccgcaccgcggcgtcatcgaggccgtctacctgcgcacgcccttctccgccggcaacgccaccacataa

SEQ ID NO: 217 - DNA, 2850 bp, Adenovirus D37
  MISC_FEATURE (1)..(2850): Hexon Gene
atgtgccttaccgccagagaacgcgcgaagatggccaccccctcgatgatgccgcagtgggcgtacatgcacatcgccgggcaggacgcctcggagtacctgagcccgggtctggtgcagtttgcccgcgccaccgacacgtacttcagcctgggcaacaagtttaggaaccccacggtggctcccacccacgatgtgaccacggaccggtcccagcgtctgacgctgcgctttgtgcccgtggatcgcgaggacaccacgtactcgtacaaggcgcgcttcactctggccgtgggcgacaaccgggtgctagacatggccagcacttactttgacatccgcggcgtcctggaccgcggcccaagcttcaaaccctactcgggcacggcttacaacagcctggcccccaagggcgcccccaatcccagtcagtggactaccaaagaaaagcaaaacggaggaactggagcagaaaaagatgttacaaagacatttggacttgccgccatgggaggcagtaatatttctaaagacggtttgcagattggaactgacaaaacagcaaatgctgaaaaaccaatctatgcagacaaaactttccagccagaacctcaagttggagaagaaaactggcaggataatgatgaatattatggcggcagggctcttaaaaaagataccaaaatgaagccatgctatggttcatttgctaaacccacaaacaaggaaggtgggcaggctaaattgaaagaaacacccaatggtaccgatcctcaatacgatgtggacatggctttctttgactcaagcactataaatataccagatgtggtgttgtacactgaaaatgtagatttggaaactccagatacacatgtggtgtacaaaccaggcaaagaggatgacagttctgaagctaatttaactcagcagtccatgcctaacagaccaaactacattggcttcagagacaactttgtggggctattgtactacaacagcactggcaacatgggtgtgctggctggtcaggcttctcagttgaatgccgtggtcgacttgcaagacagaaacaccgaactgtcttaccagctcttgctagattctcttggtgacagaaccagatattttagtatgtggaactctgcggtggacagctatgatcccgatgtcaggatcattgagaaccacggtgtggaagatgaacttcctaactattgcttccccttggacggtgttcaaactaattcagcctatcaaggtgttaaactaaagcctgatcaaacaggaggcggagttaatggagattgggtaaaggatgatgacatttcagcccataatcaaattggaaagggcaacatctttgccatggagatcaacctccaggccaacctgtggaagagttttctgtactcgaacgtggccctgtacctgcccgactcctacaagtacacgccggccaacgtcacgctgcccgccaacaccaacacctatgagtacatgaacggccgcgtggtagccccctcgctggtggacgcctacattaacatcggcgcccgctggtcgctggaccccatggacaacgtcaacccctttaaccaccaccgcaatgcgggcctgcgctaccgctccatgcttttgggcaatggccgctacgtgcccttccacatccaagtgccccaaaagttctttgccatcaagaacctgctcctgctccccggctcctacacctacgagtggaacttccgcaaggatgtcaacatgatcctgcagagttccctcggaaacgacctgcgcgtcgacggcgcctccgtccgcttcgacagcgtcaacctctacgccaccttcttccccatggcgcacaacaccgcctccaccctggaagccatgctgcgcaacgacaccaacgaccagtccttcaacgactacctctcggccgccaacatgctctaccccatcccggccaaggccaccaacgtgcccatttccatcccctcgcgcaactgggccgccttccgcggctggagtttcacccggctcaagaccaaggaaactccctcccttggctcgggttttgacccctactttgtctactcgggctccatcccctacctcgacgggaccttctacctcaaccacaccttcaagaaggtttccatcatgttcgactcctcggtcagctggcccggcaacgaccggctgcttacgccgaacgagttcgagatcaagcgcagcgtcgacggggagggctacaacgtggcccaatgcaacatgaccaaggactggttcctcgtccagatgctctcccactacaacatcggctaccagggcttccatgtgcccgagggctacaaggaccgcatgtactccttcttccgcaacttccagcccatgagcaggcaggtggtcgatgagatcaactacaaggactacaaggcagtcaccctgcccttccagcacaacaactctggcttcaccggctacctggcacccaccatgcgtcaggggcagccctaccccgccaacttcccctacccgctcatcggctccaccgcagtgccatccgtcacccagaaaaagttcctctgcgacagggtcatgtggcgcatccccttctccagcaacttcatgtccatgggcgccctcaccgacctgggtcagaacatgctctacgccaactcggcccacgcgctcgacatgaccttcgaggtggaccccatggatgagcccaccctcctctatcttctcttcgaagttttcgacgtggtcagagtgcaccagccgcaccgcggcgtcatcgaggccgtctacctgcgcacgcccttctccgccggcaacgccaccacctaa

SEQ ID NO: 218 - DNA, 2856 bp, Adenovirus D69
  MISC_FEATURE (1)..(2856): Hexon Gene
atgtgccttaccgccagagaacgcgcgaagatggccaccccctcgatgatgccgcagtgggcgtacatgcacatcgccgggcaggacgcctcggagtacctgagcccgggtctggtgcagtttgcccgcgccaccgacacgtacttcagcctgggcaacaagtttaggaaccccacggtggctcccacccacgatgtgaccacggaccggtcccagcgtctgacgctgcgcttcgtgcccgtggatcgcgaggacaccacgtactcgtacaaggcgcgcttcactctggccgtgggcgacaaccgggtgctagacatggccagcacttactttgacatccgcggcgtcctggaccgcggtcccagcttcaaaccctactcgggcacggcctacaacagtctggcccccaagggcgcccccaactccagtcagtgggaacagaaaaaggccaatgctggagatcaaaaggaaacacatacttatggtgtagctcctatgggtggagaaaacattacaattagcggtttgcaaattggaacagatactacaaatggcaaacaagacccgatatatgctaataagctgtatcaaccagagcctcaagtaggagaagaaaactggcaggaaacagaagccttctatggaggaagggctcttaaaaaggaaaccaagatgaaaccatgctatggctcatttgccagacccacaaatgaaaaaggaggacaggcaaaactaagagaccctgaaaaaagtcaagaagattttgacatagacctagcattctttgatactccgggaggaactttaacaggtggtggaacggaatacaaagcagacattgttatgtgcactgaaaatgttaatcttgaaaccccggacacccacgtggtgtataaaccaggcaaagatgatgacagttcagaaatcaacttggttcagcagtccatgcccaacagacctaactacatcggcttcagggacaactttgtgggtctcatgtactacaacagcactggcaacatgggtgtgctggccggtcaggcttctcagttgaatgctgtggtcgacttgcaagacagaaacacagagctgtcttaccagctcttgctagattctctgggcgacagaaccaggtactttagcatgtggaactctgcggtggacagctatgatcccgatgtcaggatcattgagaatcacggtgtggaagatgaacttcccaactattgcttcccattggatgggtctggcaccaatgctgcttatgaaggtgtaaaagttaaaaatggagaagatggggatcaagagagcgaatgggaaaaagacaccaatgtggcagatcgaaaccaaatatgcaagggcaacatctacgccatggagatcaacctccaggccaacctgtggaagagttttctgtactcgaatgtggccctgtacctgcctgactcctacaagtacacgccggccaacgtcacgctgcccgccaacaccaacacctacgagtacatgaacggccgcgtggtagccccctcgctggtggacgcctacatcaacatcggcgcccgctggtcgttggaccccatggacaacgtcaaccccttcaaccaccaccgcaatgcgggcctgcgctaccgctccatgcttctgggcaacggccgctacgtgcccttccacatccaagtgccccaaaagttctttgccatcaagaacctgctcctgctcccgggctcctacacctacgagtggaacttccgcaaggacgtcaacatgatcctgcagagttccctcggaaacgatctgcgcgtcgacggcgcctccgtccgcttcgacagcgtcaacctctacgccaccttcttccccatggcgcacaacaccgcctccaccctggaagccatgctgcgcaacgacaccaacgaccagtccttcaacgactacctctcggccgccaacatgctctaccccatcccggccaaggccaccaacgtgcccatctccatcccctcgcgcaactgggccgccttccgcggctggagtttcacccggctcaagaccaaggaaactccctccctcggctcgggtttcgacccctactttgtctactcgggctccatcccctatctcgacgggaccttctacctcaaccacaccttcaagaaggtctccatcatgttcgactcctcggtcagctggcccggcaacgaccggctgctcacgccgaacgagttcgagatcaagcgcagcgtcgacggggagggctacaatgtggcccaatgcaacatgaccaaggactggttcctcgtccagatgctctcccactacaacatcggttaccagggcttccatgtgcccgagggctacaaggaccgcatgtactccttcttccgcaacttccagcccatgagcaggcaggtggtcgatgagatcaactacaaggactacaaggccgtcaccctgcccttccagcacaacaactctggcttcaccggctacctcgcacccaccatgcgtcaggggcagccctaccccgccaacttcccctacccgctcatcggccagacagccgtgccatccgtcacccagaaaaagttcctctgcgacagggtcatgtggcgcatccccttctccagcaacttcatgtccatgggcgcccttaccgacctgggtcagaacatgctctacgccaactcggcccacgcgctcgacatgacctttgaggtggaccccatggatgagcccaccctcctctatcttctcttcgaagttttcgacgtggtcagagtgcaccagccgcaccgcggcgtcatcgaggccgtctacctgcgcacgcccttctccgccggcaacgccaccacctaa

SEQ ID NO: 219 - DNA, 2775 bp, Adenovirus E4
  MISC_FEATURE (1)..(2775): Hexon Gene
atgcacatcgccggacaggacgcttcggagtacctgagtccgggtctggtgcagttcgcccgcgccacagacacctacttcagtctggggaacaagtttaggaaccccacggtggcgcctacccacgatgtgaccaccgaccgcagccagcggctgacgctgcgctttgtgcccgtggaccgggaggacaacacctactcgtacaaagtgcgctacacgctggccgtgggcgacaaccgcgtgctggacatggccagcacctactttgacatccgcggcgtgctggatcggggccctagcttcaaaccctactccggcactgcctacaacagcctggctcccaagggagcgcccaacacctgccagtggaaggattctgacagcaaaatgcatacctttggggcagctgccatgcccggtgttactgggaaaaagatagaagctgatgggctgcctattagaatagattcaacttctggaactgacacagtaatttatgctgataaaactttccaaccagaaccacaagttggaaatgacagttgggttgacaccaatggtgcagaggaaaaatatggaggcagagctctaaaggacactacaaaaatgaaaccctgttatggttcattcgccaagcctaccaacaaagaaggtggtcaggctaacttaaaagattcagaacccgccgccaccactcctaactatgatatagacctggctttctttgacagcaaaactattgttgctaactacgatccagatattgtaatgtacacagaaaatgttgacttgcagactccagatactcatattgtatacaaacctggaacagaggacaccagctctgaatccaatttgggtcagcaggccatgcctaacagacccaactacattggcttcagagacaattttatcgggctcatgtactacaacagcactggcaatatgggggtgctggccggtcaggcctctcagctgaatgctgtggttgacttgcaagacagaaacactgaactgtcctaccagctcttgcttgactctctgggtgacagaacccggtatttcagtatgtggaatcaggcggtggacagctatgatcctgatgtgcgcattattgaaaaccatggtgtggaggatgaattgccaaactattgctttccgttgaatggtgtgggattgacagacacttaccagggtgttaaagttaaaacagatgcaggttctgaaaagtgggacaaagatgacaccacagttagtaatgctaatgaaatccatgtaggcaatccttttgccatggaaatcaacatccaagccaacctgtggaggaacttcctctatgccaatgttgccctctatttgcctgataaatacaaatacacaccggccaacatcaccctgcccaccaacaccaacacctacgagtacatgaacggccgggtggtggcgccctcgctggtggacgcctacattaacattggggcgcgctggtcgctggaccccatggacaacgtaaatcccttcaaccaccaccgcaatgcgggcttgcgctaccgctccatgctcctgggcaacgggcgctacgtgccattccacatccaggtgccccagaaattttttgccattaagagcctcctgctcctgcccgggtcctacacctacgagtggaacttccgcaaggacgtcaacatgatcctgcagagttcccttggcaacgacctgcgcacagacggggcctccatcaccttcaccagcattaacctctacgccaccttcttccccatggcgcacaacaccgcctccacgcttgaggccatgctgcgcaacgacaccaatgaccaatccttcaacgactacctctcggcggccaacatgctctatcccatcccggccaacgccaccaacgtgcccatctccatcccctcgcgcaactgggccgcctttcgcggctggtccttcacgcgactcaagaccaaagagacgccctcgctgggctccgggttcgacccctacttcgtctactcgggctccatcccctacctcgacggcaccttctacctcaaccacaccttcaagaaggtctccatcaccttcgactcttccgtcagctggcccggcaacgaccggctcctgacgcccaacgagttcgaaatcaagcgcaccgtcgacggcgagggatacaacgtggcccagtgcaacatgaccaaggactggttcctggtccagatgctggcccactacaacatcggctaccagggcttctacgtgcccgagggctacaaggaccgcatgtactccttcttccgcaacttccagcccatgagccgccaggtggtggacgaggttaactacaaggactaccaggccgtcaccctggcctaccaacacaacaactcgggcttcgttggatacctcgcgcccactatgcgccagggccagccctaccccgccaactacccctacccgctcatcggcaagagcgccgttaccagcgtcacccagaaaaagttcatctgcgacagggtcatgtggcgcatccccttctccagcaacttcatgtccatgggcgcgctcaccgacctcggccagaacatgctctatgctaactccgcccacgcgctagacatgaatttcgaagtcgaccccatggatgagtccacccttctctatgttgtcttcgaagtcttcgacgtcgtccgagtgcaccagccccaccgcggcgtcattgaggccgtctacctgcgcacccccttctcagccggtaacgccaccacataa

SEQ ID NO: 220 - DNA, 2763 bp, Adenovirus G52
  MISC_FEATURE (1)..(2763): Hexon Gene
atggccaccccatcgatgatgccgcagtggtcttacatgcacatcgccggccaggacgcctcggagtacctgagtcccggcctcgtgcagtttgcccgcgccaccgacacctacttcagcttgggaaacaagtttagaaaccccaccgtggcccccacccacgatgtgaccacggaccgctcgcagaggctcaccctgcgctttgtgcccgtagaccgggaggacaccgcgtactcttacaaagtgcgctacacgctggccgtaggggacaaccgagtgctggacatggccagcacctacttcgacatccggggggtgctggatcggggtcctagcttcaagccctactccggcaccgcttacaactccctggctcccaagggagctccaaactccgtagagtggccggataatactaaaacaaaagtgagagcccaagcaccgtttgtaagcgacgaaatcactaaagacggcataaaggttggaacagataccgcaaccacccaacaaagcatttacgccgataaaacgtatcaacctgaaccacaagtaggggaaacacagtggaacagcgatgtaggcactaatgataaagtggcaggaagagttttaaagaaaacgaccccaatgtatccttgttatggttcttacgcacgacccacgaacgaaaaaggagggcaggcgaaggctgacacccaagtggatatgcagttttttgccaccactgcagccaatacaacaccaaaagctgttctttatgctgaagatgttaacttagaaggtcccgatacgcacttggtgtttaaacccactgtgacagagggaacgacaagtgccgaagctttgctagcgcaacaagccgctccaaaccgtccaaattacattgcttttagggacaattttattggactaatgtattacaacagcacgggaaacatgggggtgcttgccggtcaggcttcgcagctaaatgcggtagtagatttgcaagatagaaatacggaactatcctaccagctgatgttggatgcactgggagacagaagtcgctacttttctatgtggaatcaagccgtagatagttatgatccagatgttagaattgtggaaaatcacggagtagaggacgaactaccaaactattgtttcccattgggaggaatggcggtcacagacacctactcccccataaaatccaataatggaagcggttggcaagtagacaacgatacgtttgccgacaggggggtggaaataggctcgggaaacatgttcgccatggagatcaatttgcaagccaacctgtggcgcagttttttgtattctaacattgggctatacctcccggactctttaaaattaacccctgacaacatcacactcccagaaaacaaaaacacctaccagtacatgaacgggcgtgtgacaccacccgggcttgtggacacatacgtcaatgtgggagcccgctggtcccccgatgttatggacagcatcaaccccttcaaccaccaccgcaatgctggccttcgctaccgttccatgctcctgggcaacggtcgctacgtaccattccacattcaggtgccccagaaattttttgccattaagaatcttttgctgctccccggttcctacacctacgagtggaacttccgcaaggacgtgaacatgattttgcaaagctcgctgggtaacgacctgcgagttgacggggccagcatacgcttcgacagcatcaacctgtatgctaactttttccccatggcccacaacacagcttccaccctggaagccatgctgcgcaacgacaccaatgaccagtccttcaacgactacctgtgcgcggccaacatgctgtatcccatccccgccaatgccaccagcgtgcccatctccatcccgtctcgcaactgggccgccttcaggggctggagttttacccgcctcaaaaccaaggagaccccctcgctgggctccgggttcgacccctactttgtctactccggctccattccctacctggacggtaccttctacctcaaccatacttttaagaaggtgtccatcatgtttgactcgtcggtcagctggcccggcaacgaccgcctgctaactccaaatgagtttgaaatcaagcgttcggtggacggtgaagggtacaacgtggcccagagcaacatgaccaaggactggttcctaattcagatgctcagccattacaacatcggctaccagggtttctacgtgcccgagaattacaaagaccgcatgtactccttctttagaaacttccaacctatgagccgtcaagtagtagatactgtggcttataaggactactatcaggacgttaagctcccctaccagcacaacaactcagggttcgtgggctacatgggtcccaccatgcgagaggggcaagcgtaccccgccaactacccctatcccctgattggggccaccgccgtacccagcctgacgcagaaaaagttcctctgtgaccgggtgatgtggaggatacccttctctagcaacttcatgtctatgggctccctcaccgacctggggcagaacatgctgtacgccaactccgctcacgccttggacatgacctttgaggtggatcccatggatgagcccacgcttctctatgttctgtttgaagtcttcgacgtggtgcgcatccaccagccgcaccgcggcgtcatcgaggccgtctacctgcgcacacctttctctgccggtaacgccaccacctaa

SEQ ID NO: 221 - DNA, 34 bp, Artificial Sequence
  loxP site
ataacttcgtatagcatacattatacgaagttat

SEQ ID NO: 222 - DNA, 34 bp, Artificial Sequence
  FRT site
gaagttcctatactttctagagaataggaacttc

SEQ ID NO: 223 - DNA, 1023 bp, Artificial Sequence
  SB100X (Sleeping Beauty) transposase
atgggaaaatcaaaagaaatcagccaagacctcagaaaaagaattgtagacctccacaagtctggttcatccttgggagcaatttccaaacgcctggcggtaccacgttcatctgtacaaacaatagtacgcaagtataaacaccatgggaccacgcagccgtcataccgctcaggaaggagacgcgttctgtctcctagagatgaacgtactttggtgcgaaaagtgcaaatcaatcccagaacagcggcaaaggaccttgtgaagatgctggaggaaacaggcacaaaagtatctatatccacagtaaaacgagtcctatatcgacataacctgaaaggccactcagcaaggaagaagccactgctccaaaaccgacataagaaagccagactacggtttgcaactgcacatggggacaaagatcgtactttttggagaaatgtcctctggtctgatgaaacaaaaatagaactgtttggccataatgaccatcgttatgtttggaggaagaagggggaggcttgcaagccgaagaacaccatcccaaccgtgaagcacgggggtggcagcatcatgttgtgggggtgctttgctgcaggagggactggtgcacttcacaaaatagatggcatcatggacgcggtgcagtatgtggatatattgaagcaacatctcaagacatcagtcaggaagttaaagcttggtcgcaaatgggtcttccaacacgacaatgaccccaagcatacttccaaagttgtggcaaaatggcttaaggacaacaaagtcaaggtattggagtggccatcacaaagccctgacctcaatcctatagaaaatttgtgggcagaactgaaaaagcgtgtgcgagcaaggaggcctacaaacctgactcagttacaccagctctgtcaggaggaatgggccaaaattcacccaaattattgtgggaagcttgtggaaggctacccgaaacgtttgacccaagttaaacaatttaaaggcaatgctaccaaatactag

SEQ ID NO: 224 - DNA, 228 bp, Artificial Sequence
  Sleeping Beauty Left inverted repeat (LIR)
cttagtgtatgtaaacttctgacccactggaattgtgatacagtgaattataagtgaaataatctgtctgtaaacaattgttggaaaaatgacttgtgtcatgcacaaagtagatgtcctaactgacttgccaaaactattgtttgttaacaagaaatttgtggagtagttgaaaaacgagttttaatgactccaacttaagtgtatgtaaacttccgacttcaactg

SEQ ID NO: 225 - DNA, 228 bp, Artificial Sequence
  Sleeping Beauty Right inverted repeat (RIR)
cagttgaagtcggaagtttacatacaccttagccaaatacatttaaactcactttttcacaattcctgacatttaatcctagtaaaaattccctgtcttaggtcagttaggatcaccactttattttaagaatgtgaaatatcagaataatagtagagagaatgattcatttcagcttttatttctttcatcacattcccagtgggtcagaagtttacatacactcaa

SEQ ID NO: 226 - DNA, 1785 bp, Artificial Sequence
  piggyBac transposase gene
atgggcagcagcctggacgacgagcacatcctgagcgccctgctgcagagcgacgacgagctggtcggcgaggacagcgacagcgagatcagcgaccacgtgagcgaggacgacgtgcagtccgacaccgaggaggccttcatcgacgaggtgcacgaggtgcagcctaccagcagcggctccgagatcctggacgagcagaacgtgatcgagcagcccggcagctccctggccagcaacaggatcctgaccctgccccagaggaccatcaggggcaagaacaagcactgctggtccacctccaagagcaccaggcggagcagggtgtccgccctgaacatcgtgagaagccagaggggccccaccaggatgtgcaggaacatctacgaccccctgctgtgcttcaagctgttcttcaccgacgagatcatcagcgagatcgtgaagtggaccaacgccgagatcagcctgaagaggcgggagagcatgaccggcgccaccttcagggacaccaacgaggacgagatctacgccttcttcggcatcctggtgatgaccgccgtgaggaaggacaaccacatgagcaccgacgacctgttcgacagatccctgagcatggtgtacgtgagcgtgatgagcagggacagattcgacttcctgatcagatgcctgaggatggacgacaagagcatcaggcccaccctgcgggagaacgacgtgttcacccccgtgagaaagatctgggacctgttcatccaccagtgcatccagaactacacccctggcgcccacctgaccatcgacgagcagctgctgggcttcaggggcaggtgccccttcaggatgtatatccccaacaagcccagcaagtacggcatcaagatcctgatgatgtgcgacagcggcaccaagtacatgatcaacggcatgccctacctgggcaggggcacccagaccaacggcgtgcccctgggcgagtactacgtgaaggagctgtccaagcccgtccacggcagctgcagaaacatcacctgcgacaactggttcaccagcatccccctggccaagaacctgctgcaggagccctacaagctgaccatcgtgggcaccgtgagaagcaacaagagagagatccccgaggtcctgaagaacagcaggtccaggcccgtgggcaccagcatgttctgcttcgacggccccctgaccctggtgtcctacaagcccaagcccgccaagatggtgtacctgctgtccagctgcgacgaggacgccagcatcaacgagagcaccggcaagccccagatggtgatgtactacaaccagaccaagggcggcgtggacaccctggaccagatgtgcagcgtgatgacctgcagcagaaagaccaacaggtggcccatggccctgctgtacggcatgatcaacatcgcctgcatcaacagcttcatcatctacagccacaacgtgagcagcaagggcgagaaggtgcagagccggaaaaagttcatgcggaacctgtacatgagcctgacctccagcttcatgaggaagaggctggaggcccccaccctgaagagatacctgagggacaacatcagcaacatcctgcccaacgaggtgcccggcaccagcgacgacagcaccgaggagcccgtgatgaagaagaggacctactgcacctactgtcccagcaagatcagaagaaaggccaacgccagctgcaagaagtgtaagaaggtcatctgccgggagcacaacatcgacatgtgccagagctgtttctga

SEQ ID NO: 227 - DNA, 3670 bp, Artificial Sequence
  GLN multicistronic-expression cassette
tagtaatcaattacggggtcattagttcatagcccatatatggagttccgcgttacataacttacggtaaatggcccgcctggctgaccgcccaacgacccccgcccattgacgtcaataatgacgtatgttcccatagtaacgccaatagggactttccattgacgtcaatgggtggagtatttacggtaaactgcccacttggcagtacatcaagtgtatcatatgccaagtacgccccctattgacgtcaatgacggtaaatggcccgcctggcattatgcccagtacatgaccttatgggactttcctacttggcagtacatctacgtattagtcatcgctattaccatggtcgaggtgagccccacgttctgcttcactctccccatctcccccccctccccacccccaattttgtatttatttattttttaattattttgtgcagcgatgggggcggggggggggggggggcgcgcgccaggcggggcggggcggggcgaggggcggggcggggcgaggcggagaggtgcggcggcagccaatcagagcggcgcgctccgaaagtttccttttatggcgaggcggcggcggcggcggccctataaaaagcgaagcgcgcggcgggcgggagtcgctgcgttgccttcgccccgtgccccgctccgcgccgcctcgcgccgcccgccccggctctgactgaccgcgttactcccacaggtgagcgggcgggacggcccttctcctccgggctgtaattagcgcttggtttaatgacggcttgtttcttttctgtggctgcgtgaaagccttgaggggctccgggagggccccggcaggaaggaaatgggcggggagggccttcgtgcgtcgccgcgccgccgtccccttctccctctccagcctcggggctgtccgcggggggacggctgccttcgggggggacggggcagggcggggttcggcttctggcgtgtgaccggcggctctagagcctctgctaaccatgttcatgccttcttctttttcctacagctcctgggcaacgtgctggttattgtgctgtctcatcattttggcaaagaattgattaattcgagcgaacgcgtggtaccgaagccgctagcgctaccggtcgccaccatgcccgccatgaagatcgagtgccgcatcaccggcaccctgaacggcgtggagttcgagctggtgggcggcggagagggcacccccgagcagggccgcatgaccaacaagatgaagagcaccaaaggcgccctgaccttcagcccctacctgctgagccacgtgatgggctacggcttctaccacttcggcacctaccccagcggctacgagaaccccttcctgcacgccatcaacaacggcggctacaccaacacccgcatcgagaagtacgaggacggcggcgtgctgcacgtgagcttcagctaccgctacgaggccggccgcgtgatcggcgacttcaaggtggtgggcaccggcttccccgaggacagcgtgatcttcaccgacaagatcatccgcagcaacgccaccgtggagcacctgcaccccatgggcgataacgtgctggtgggcagcttcgcccgcaccttcagcctgcgcgacggcggctactacagcttcgtggtggacagccacatgcacttcaagagcgccatccaccccagcatcctgcagaacgggggccccatgttcgccttccgccgcgtggaggagctgcacagcaacaccgagctgggcatcgtggagtaccagcacgccttcaagacccccatcgccttcgccagatctcgagctcgaggaagcggagctactaacttcagcctgctgaagcaggctggagacgttgaagaaaaccccgggcccggatccatggtcttcacactcgaagatttcgttggggactggcgacagacagccggctacaacctggaccaagtccttgaacagggaggtgtgtccagtttgtttcagaatctcggggtgtccgtaactccgatccaaaggattgtcctgagcggtgaaaatgggctgaagatcgacatccatgtcatcatcccgtatgaaggtctgagcggcgaccaaatgggccagatcgaaaaaatttttaaggtggtgtaccctgtggatgatcatcactttaaggtgatcctgcactatggcacactggtaatcgacggggttacgccgaacatgatcgactatttcggacggccgtatgaaggcatcgccgtgttcgacggcaaaaagatcactgtaacagggaccctgtggaacggcaacaaaattatcgacgagcgcctgatcaaccccgacggctccctgctgttccgagtaaccatcaacggagtgaccggctggcggctgtgcgaacgcattctggcgggaagttcctattctctagaaagtataggaacttccagagccgagggcaggggaagtcttctaacatgcggggacgtggaggaaaatcccgggcccgctatggccacaacctgttacattgcacaagataaaaatatatcatcacgaacagtaaaactgtctgcttacataaacagtaatacaaggggtgttatgggatcggccattgaacaagatggattgcacgcaggttctccggccgcttgggtggagaggctattcggctatgactgggcacaacaggcaatcggctgctctgatgccgccgtgttccggctgtcagcgcaggggcgcccggttctttttgtcaagaccgacctgtccggtgccctgaatgaactgcaggacgaggcagcgcggctatcgtggctggccacgacgggcgttccttgcgcagctgtgctcgacgttgtcactgaagcgggaagggactggctgctattgggcgaagtgccggggcaggatctcctgtcatctcaccttgctcctgccgagaaagtatccatcatggctgatgcaatgcggcggctgcatacgcttgatccggctacctgcccattcgaccaccaagcgaaacatcgcatcgagcgagcacgtactcggatggaagccggtcttgtcgatcaggatgatctggacgaagagcatcaggggctcgcgccagccgaactgttcgccaggctcaaggcgcgcatgcccgacggcgaggatctcgtcgtgacccatggcgatgcctgcttgccgaatatcatggtggaaaatggccgcttttctggattcatcgactgtggccggctgggtgtggcggaccgctatcaggacatagcgttggctacccgtgatattgctgaagagcttggcggcgaatgggctgaccgcttcctcgtgctttacggtatcgccgctcccgattcgcagcgcatcgccttctatcgccttcttgacgagttcttctgagaagttcctattctctagaaagtataggaacttcctaatgaggccgcgactctagagtcggggcggccggccgcttcgagcagacatgataagatacattgatgagtttggacaaaccacaactagaatgcagtgaaaaaaatgctttatttgtgaaatttgtgatgctattgctttatttgtaaccattataagctgcaataaacaagttaacaacaacaattgcattcattttatgtttcaggttcagggggaggtgtgg

SEQ ID NO: 228 - DNA, 120 bp, Artificial Sequence
  A12.orf00001 hypothetical protein
atgcatgctcgagcggccgccagtgtgatggatatctgcagaattcgcccttccttaattaacctgcagcgatcgcgtttaaacaagggcgaattccagcacactggcggccgttactag

SEQ ID NO: 229 - DNA, 384 bp, Adenovirus A12
  MISC_FEATURE (1)..(384): A12.orf00003 E4 ORF1 protein
atggctgcttttgagactctttatgtgtattttacgggacctggggctatgttgcctaaacaagagggcgactctaatgcttatgtgttattttctcctgcgaattttgttatacctccacatggagttgtgcttttatatttgcacatagcagttgatattcctcctggatatttgggaacattgttttcattatgcgacatgaacgccagaggggtttttgttggcgctgaaacgctttatccaggctcaagaatggagctcagtgttttgttgtttaatcattccgacgtgttttgcgatgttcgcgcaaagcagccagtcgcgcgcttgcttttaagtagagttgtttttccacccgtttgccaggcatctttaatttaa

SEQ ID NO: 230 - DNA, 267 bp, Adenovirus A12
  MISC_FEATURE (1)..(267): A12.orf00004 E4 ORF2 protein
atgcattatttaactcctcctatgcgcgatgtctacgttggcgccacgcttactaatatgggtccatttgtgcaagttgtatgttctgtgggaactccggaacttgtacctggaggtgaactttctttgctgctggcttctgatttgtatgattttatacaactggcattaagatgtcagctgcgagaccaaggtgtggagcctaatgtaaatctactgaatttactgcaggtgtttgaagatccagacttttttcagcaaatatga

SEQ ID NO: 231 - DNA, 351 bp, Adenovirus A12
  MISC_FEATURE (1)..(351): A12.orf00005 E4 ORF3 protein
atgaagtactgcctgcggatggcggtggagggcgcccttacagagctttttaatattcacggtttaaacctgcaaaatcagtgtgttcaaataatacaacagtggaagaatgaaaattacctgggaatggttcagtcaggcagtttgatgatagaagagtttcatgataatgcatttgctttgcttttgtttatcgaaatcagagctgtggctcttttagaagctgttgttgaacatttggaaaatcgcttacaatttgatctggctgtgatctttcaccagcacagcggaggcgatcgctgccacctgcgagatttacgcattcaaatccttgctgaccgtcttgattaa

SEQ ID NO: 232 - DNA, 876 bp, Adenovirus A12
  MISC_FEATURE (1)..(876): A12.orf00008 E4 control protein 34 kDa
atgcagcgcgacagacggtatcgctacagattggcaccatacaacaagtaccaactaccgccctgtgaggaacagtcaaaagctacgttgagtacttcggaaaattctttatggcctgagtgtaatagtctgactttacataatgtaagtgaggtaagaggcattccttcatgtgtaggttttacagtgctgcaggaatggccaataccgtgggatatgattctaactgattatgagatgtttattttgaaaaaatacatgagtgtatgtatgtgttgtgccactataaatgttgaagttactcaattattacatggtcatgagcggtggcttattcattgtcattgccagcgtccgggttcactacagtgtatgtcagctgggatgcttttgggacgctggttcaaaatggccgtatatggcgccttaattaacaaaaggtgtttttggtatcgggaggttgttaaccatttaatgcctaaagaggtgatgtatgtgggaagcacctttgttagaggtcgccatttaatttactttaaaattatgtatgatggccatgcctggttagcgttagaaaaagttagttttggatggagcgcctttaattatggaattttaaataacatgttagtgctgtgttgtgattattgtaaagacttaagtgagatacgcatgcgctgttgcgctcgtcgtaccagactgctaatgttaaaagttgttcaagtaattgctgaaaacactgttcgccctctaaaacatagtcggcatgaacgttatcgtcagcaactgctaaagggtttaattatgcatcatcgagcaattttatttggagattataatcaacgagagaatccttgggcggctgatggacactga

SEQ ID NO: 233 - DNA, 225 bp, Adenovirus A12
  MISC_FEATURE (1)..(225): A12.orf00009 E4 ORF 6/7 protein
atggacctggttttggatggggaatgccgcttgagtgactgtgcgggcgagggattcgtttccatcaccgaccctcgctttgcccgtaaagaaactgtgtggacgctaacgccaaaaaacctaagtcgaaatattcaagtgcagttgttttcagctacaaagggggaaagggaggtatacaaggtaaaatgggaaggaggcagtttaaccacgcgtatagtgtaa

SEQ ID NO: 234 - DNA, 1764 bp, Adenovirus A12; identical to SEQ ID NO: 129
  MISC_FEATURE (1)..(1764): A12.orf00012 L5 fiber

SEQ ID NO: 235 - DNA, 159 bp, Adenovirus A12
  MISC_FEATURE (1)..(159): A12.orf00013 U protein
atgaagatggtgggtagggattgggaagaagaatctgaccttccatttaagatttggagaaagtttgctgtttgcaagtctgtcaggtttgacagttgggaagagggaaattttataagagtacacggagaccatgatgtattttcagatttccggtaa

SEQ ID NO: 236 - DNA, 387 bp, Adenovirus A12
  MISC_FEATURE (1)..(387): A12.orf00015 E3 14.7 kDa protein
atgattgaacctgatctagaaattgatggaagaatcaccgaacagaggctcctcactgatcgcgctaggcgacgccaacaggatcaaaaaaataaagagttaattgatttacaaaccgtgcatcagtgtaaaaaaggacttttttgcctggtaaaacaagctacccttcgctatgaatctttaccaggcaaagaacatcaactgtgctacacgctgcccactcagcgacaaacctttactgcaatggtgggctcggtacctattaaagtgtcccaacaagcaggagaacaagaaggctctattcggcgcctatgtgataaccctgaatgtttgtacactttaataaaaacactgtgcggtttaagaaatcttttaccaatgaattaa

SEQ ID NO: 237 - DNA, 333 bp, Adenovirus A12
  MISC_FEATURE (1)..(333): A12.orf00017 E3 RID-beta
atgaaaacagcattagttcttttctttatgttaatcccagtttgggctagttcttgtcaactacataaaccatggaattttttagattgttatactaaagaaacaaactacataggctgggtttatggaattatgtctggcttagtatttgtctcctctgtagtttctttacaactgtatgcgcgccttaattttagttggaataagtatactgatgatcttcccgaatatccaaacccccaggatgatttacccctaaatattgtatttccagagcccccgcgtcctccttctgttgttagctattttaagttcaccggtgaagatgattga

SEQ ID NO: 238 - DNA, 276 bp, Adenovirus A12
  MISC_FEATURE (1)..(276): A12.orf00019 E3 RID-alpha
atggtgacggttcttctcatctttttatgcctgccagtcattttttcttcttcgacttttgccgcagtcagtgaccttgatcccgagtgtttagccccctttgcggtgtacctgattttcacatttgtgactgctacctgcgtctgcagtattattactctgctaatcacctcgctccaattttttgattactactacgtgagaattgtttaccgcagacaccacccccgttaccaaaaccctcaaattgcggctcttttgcagctccaaccatga

SEQ ID NO: 239 - DNA, 807 bp, Adenovirus A12
  MISC_FEATURE (1)..(807): A12.orf00020 E3 CR1-beta
atgctttccatttttcttttatttctcttttctttaccttctggcttgtatgctcaaacagccgaaagaccactaaaagtcgtggtggaagctggccataatgtaacccttccccacctttctggttcacaccaaactggccatgttacttggctagtagagacatcagattatggttcagcttctccagacaacttcattttcagtggacaaaaactatgccagtttactgacagaaccatggtgtggccttattacaatttacattttaactgtgaaaattatgaccttaatctgttttggcttaaggtggaaaattcggctatttacaacgttaaaaatacagtcaatgcttctgaaacaaatatttactatgatttaagagtagtacaaatttttccacctaaatgcatcattacttcaaagtaccttacaaacgattattgtcacattacaattaactgcactaactctgattaccccaataaggttgtgtttaataatgtcagtcgatggtactacggatacggtaagggcagcccaacccttcccaactactttataactaactttaatgtttcaggtattactaaaagctttaatcacacttacccttttaatgagctctgtgattatcccacatcccaatctcaacacagtttaacacatacagtaagcacagtaatctttttaggaataattggcttcagcattttgattattatagcagcctttatttatctgtgctggcatagaaaatctttgtgtgtttctaaaacagaacctcttatgccgattccttactag

SEQ ID NO: 240 - DNA, 771 bp, Adenovirus A12
  MISC_FEATURE (1)..(771): A12.orf00021 E3 CR1-alpha
gtgctgaatttaatcatctgtagtggcgctgtaccgcctgaagaagaacctaactgtcatccgcatttaagcaacattaaaatcaacctttcgatccctcatatcactcttcgctgcagttttttttccacacatctcacctggacctttaacggaaaacacgttaccaatacagatataaagtttaaactacacaaagaaaacatcactctatttcaacctattaacctgggatactaccgctgctcagctccaccctgtacgcaagcattttttgttgctccagttattgacaaacgccctgctccgacaacagctgctgtcactgagcacatcaccgaggcagtttctccttctaaaggtacagaggaaattgtgtacttttcaaactttacaaaccacttagttttaaattgttcctgttctaactccttaatttcatggtttgctaacagctctctgtgcaaaactttctaccaaggaaaacttttgtattctgctaaactcacattgtgtaaccagagcaccccttcccaccttactctattgccaccttttgttgccggtcgttacttttgcataggagctgcacgtactagcccctgtcaacagcattggaatttaacttactgtcccccaccagtgtcgccctttgtgatcaatactgaatatttagactataatcccttgcttgcttacggcggtctcgcagctcttattttattcctgatttctaacttgtttctagtgcaacatttgtattcatactaa

SEQ ID NO: 241 - DNA, 318 bp, Adenovirus A12
  MISC_FEATURE (1)..(318): A12.orf00022 E3 12.5 kDa immune modulating protein
atgtctaatggagcggctgacagagcgcggctgcgacatttagaccactgtcgccaacctcactgctttgctcgagacatctgtgtctttacctactttgagcttccagaggagcacccccaggggccagctcacggtgtcagaataacagttgaaaaaggaattgatacacacctcattaaatttttcaccaaacgcccgctattggtggaaaaagatcaaggaaatactatattaactttatattgcatttgtcctgttcccggattacatgaagatttctgctgtcatttgtgtgctgaatttaatcatctgtag

SEQ ID NO: 242 - DNA, 702 bp, Adenovirus A12
  MISC_FEATURE (1)..(702): A12.orf00023 L4 protein VIII
atgagtaaagatattcccacgccttacatgtggagctttcaaccgcaaatgggactggcggccggcgcggctcaagactattctagcaaaatgaattggttaagcgccggaccccacatgatttccagggtgaatggggtacgagcccggcgtaaccaaatactgctagaacaagccgctctcaccgctacaccacgtaatcaacttaaccctccctcttggccagctgccctgatatatcaggaaaatccccctcctaccactgtacttttgcctcgcgacgcccaggccgaagtccatatgactaacgctggggcacagcttgcgggcggtgcacgtcacagtttcaggtataaaggtcgcactgagccctatccgtctccagctataaaaagagtactcatcagagggaaaggtattcagctgaacgacgaagtcacatcgccattgggagtcagacccgacggagtgtttcagctcggagggtccggacgttcctcctttaccgctcgtcaagcctacctgacactacagagctcatcctcagctccgagatctggtggtattggaactctccaatttgtggaggaatttactccatctgtttacttcaatcctttttcgggctcgcctggacactatcctgacgccttcatacccaactttgacgcagtgagtgaatctgtggatggctatgattaa

SEQ ID NO: 243 - DNA, 357 bp, Adenovirus A12
  MISC_FEATURE (1)..(357): A12.orf00026 L4 splicing factor
atgatggagtggcgattccaaggaatgtcctccattactaccgtcatctctacagcccctttgaagagctcgacaaggaaccgacctgcaacagccaagcggcccactagaatcggcaacagcagcaacaaggaaagtcctgaggcgcgcgagttaagaaaacgcatttttcccactttatatgctatttttcagcagagtcgaggtcaagaacacgaactgaaaataaaaaaccgttccctgcgttcacttacccgcagctgtctctacctcaaaagcgaagatcagttgcaacgcaccttgcaggacgcagaagctctgttcaataaatactgctccctctcgcttaaagagtaa

SEQ ID NO: 244 - DNA, 2349 bp, Adenovirus A12
  MISC_FEATURE (1)..(2349): A12.orf00028 L4 hexon-assembly protein
atgatggatctggagccacaggaaagcttaaccgcccccaccgctcccgccattggcgctacggctgtcatggagaaggacaaaagtctactcataccccaagacgcaccggttgagcagaacttgggctacgagactccccccgaggaatttgaaggctttcttcaaatccaaaagcaaccaaatgagcaaaacgctgggctcgaggaccatgactacctaaacgagggagatgtcctgtttaaacatctacagcgacaaagcactatcgttcgcgacgccatatctgatcgctcttcaataccagtttcaattgcagaactatcttgcatctacgaacgcaacctgttctccccacgtgtgccccctaaacggcaagccaacggcacatgcgagccaaatcctcgccttaacttctacccagtttttgcagtgccagaagcactggcaacataccatattttctttaaaaatcacaaaatacccctatcctgtcgagctaaccgcagccgcgcagatgagcttcttgctttaagggctggcgcttccatacctgggattgtgtccttggaagaggtgcctaaaatttttgaaggtttaggtcgggatgaaaaacgagcagcaaatgccctgcaaaaagaaaatgaacaaaatcaccatgggaatagtgctctaatagaactggaaggtgacaatgcccgcctggcagttttaaagcgcaatattgaggttactcactttgcctacccggcagtaaatcttccgccaaaggtaatgagcgcagtgatgaatcagctactaattaagcgagcccaacccattgacaaagatgcaaacttgcaagacccggaggcaacagatgatggaaagccggttgtaagcgacgagcaattaactaagtggttgggaacagacaattccaacgaactacaacagcggcgtaaactcatgatggccgccgtacttgtaactgtggaactcgagtgcatgcatcgttttttctccgacatcaccacattgcgcaaaattgaggaatgtcttcactacactttccgccatggctacgtgcgccaagcctgtaaaatttctaatgtggagctgagcaatctagtttcttacatgggcatcttgcatgaaaaccgattgggacagaacgtgctacactcaacactacgcgatgaagcacgcagagattacgtgcgagactgcatttaccttttcctgttacatacctggcaaactgggatgggtgtttggcagcaatgcttggaagaaaaaaaccttcgagaactaaacaaactgttagacagagcactaaaatccctatggaccggttttgacgaacggacagtagctgcagagctagctgacataattttcccagaaaggttaatgataaccttgcaaaacggcttgcctgactttatgagtcaaagtatgctgcacaattatcgctcttttatattagagcgttctgggatgcttcctagcatgtgttgtgcacttccttcagattttgtgcctatatattttagagagtgcccccctcccctgtggagccactgctacttactacgacttgctaactacctagcttaccactcagaccttatgacagattcaagcggcgaaggcctaatggagtgtcactgccgctgcaatctttgcaccccccaccgttctttggtttgcaatactgaactattaagtgaaagtcaagtcattggtaccttcgaaatgcagggaccgcagtctgacagcaatttcacgacgaacctaagacttacccctgggctttggacttctgcctacctgcgcaaatttgaaccccaagattaccacgcccacagtatcaatttttacgaagaccaatccaaacccccaaaagcgccactaacggcttgcgtcattacgcagggaaaaattctagcccaattgcatgctattaagcaagcgcgcgaagagtttttacttaaaaaaggacacggagtgtaccttgatccccaaaccggcgaggaactaaaccttccatcacctttgtgtgctactgcgtctccccattcgcagcatgtccccgaaagccgcaaaacaggctattgcgcagcaacgctcaaagaaacagcagcaacggcaggaaatctgggaggaagaatcttgggagagtcaggcagaggacgaggtcgaggacttggaagaatgggaggaggaggaggcggacagcctagacgaggatccagaggaggaggaggaaggttccaaggacggagcgaccgccgcaaaaccgtcgctttcaaccaagccctctccaatgaaacccgctgtgagcaaatctcagaaagccagccgtag

SEQ ID NO: 245 - DNA, 1356 bp, Adenovirus A12
  MISC_FEATURE (1)..(1356): A12.orf00032 E2A ssDNA-binding protein
atggccagcaatcagcactcacagagggagcgcaccccagaccgcagcgctcagccgccgccgccaaaaatgggcagatactttctggattccgaaagcgaagaagaactggaagctgtgcctttacctccaaagaaaaaagtcaagaaatctatggctgcgatacctctttccccagagagtgcagaagaagaagaggcagaaccaccaagagcagttttaggagtaatgggtttcagcatgccgcccgtccgcattatgcatcatgcagacggttctcagtcttttcaaaaaatggaaaccaggcaggtacacgttttgaaggcttccgctcaaaacagcgacgaaaatgaaaagaatgttgttgttgttgttcgcaatccggcaagccagcccctagtttcagcttgggaaaaaggcatggaagccatggctatgctaatggaaaagtaccatgtggatcacgacgagcgcgccacctttcgttttttgccggatcagggcagcgtgtacaagaaaatatgcacaacatggctcaacgaagaaaagcgcggtttgcagctgactttttcatcccaaaaaacctttcaggagctcatgggacgctttttgcaaggatatatgcaagcttatgccggtgtccaacagaattcctgggaacccaccggttgctgcgtgtgggagcataagtgtaccgagcgcgaaggggagcttagatgcctgcatggaatggagatggtgcgcaaagagcatttggtggaaatggatgtaaccagcgaaagtgggcaacgagcgttgaaagagaacccctcgaaagccaaggtggcgcaaaaccgctgggggcgtaatgtagttcaaattaaaaacgacgatgcccgctgctgttttcatgatgttggctgcgggaataattctttctccggaaagtcctgcggcttgttttattctgaaggaatgaaggctcaaatagcttttaggcaaattgaagcttttatgctggccgactaccctcacatgcgacatgggcaaaaacgtctccttatgccagtgcgctgcgaatgtttaaacaagcaagatggcctgccacggatggggcgtcaactgtgtaaaatcactccttttaacctcagcaatgtggataacattgatatcaacgaagtaaccgaccctggagcgttagccagtattaagtatccgtgtttgttggtttttcagtgcgcaaatccagtttatcgcaatgcgcgcggcaatgctggccctaattgcgacttcaagatttctgctcctgatgttatgggcgccctgcaacttgtgcgccagctgtggggagaaaattttgacggctcccccccctag

SEQ ID NO: 246 - DNA, 621 bp, Adenovirus A12
  MISC_FEATURE (1)..(621): A12.orf00035 L3 protease protein
atgggttcaagcgaacaggagctgacggccattgttcgagatctaggctgtggaccctattttttgggaacctttgacaaacgttttccgggttttgtgtctcgcgaccgcttatcatgtgctattgttaacactgccggtcgcgaaactgggggcgtacactggctggcttttggatggaaccccaaatcgcacacttgctatttattcgatccatttggattttctgatcaacgactaaaacaaatctatcagtttgagtacgaaagtctgttgcgccgtagtgcgctagcggccactaaagaccgatgcgttaccctagaaaagtcaacccaaactgtacaaggaccgttttctgcagcgtgcggcctgttttgttgtatgttcttacacgcttttactcactggcctgaccatccaatggataaaaatcccactatggacctacttactggggtgcctaattgtatgctacaaagtcctcaggtagtgggcacattgcaacgcaatcagaatgaattgtataaattcttaaacaatctgtccccttactttcgtcacaaccgcgagcgcatagaaaaagctacatcttttactaaaatgcaaaatggactcaaataa

SEQ ID NO: 247 - DNA, 2763 bp, Adenovirus A12; identical to SEQ ID NO: 189
  MISC_FEATURE (1)..(2763): A12.orf00036 L3 hexon

SEQ ID NO: 248 - DNA, 798 bp, Adenovirus A12
  MISC_FEATURE (1)..(798): A12.orf00038 L3 VI capsid protein
atggaagacatcaatttttcgtcgctggccccgcgacacggcacgcggccgtacatgggcacctggaacgagatcggcacgagccagctgaacgggggcgccttcaattggaacagtatctggagcggtcttaaaaattttggttccacgattaagacatatggcaccaaggcgtggaacagccaaaccggccagatgctaagggacaagttaaaagaccaaaattttcaacagaaagttgtagatggtctggcttcgggaattaatggagttgtagacatagccaatcaggctgtacagaaaaaaattgccaaccgtttagagccgcggcccgacgaggtaatggtagaggaaaagctgccacctctagaaactgtgcccggatccgttccaaccaaaggagaaaagcggccacggccggatgcagaggaaaccttagtaacgcacacaacagaaccgccgtcctatgaggaagcaataaaacaaggagccgctctgtcacctaccacctatcccatgaccaagcctattttacccatggctactagagtgtatggaaaaaacgaaaatgtgcctatgacccttgagctgcctcctttgccagaacccactatcgcggatcccgtaggttccgttcctgttgcatctgttccagttgcatcgacagtgagccgtccagcagtgcggcctgttgccgtggctagcttgcgaaacccacgatccagtaattggcaaagtaccctaaacagtattgtgggactgggagtaaagtctctcaaacgccgacgctgctactaa

SEQ ID NO: 249 - DNA, 219 bp, Adenovirus A12
  MISC_FEATURE (1)..(219): A12.orf00040 L2 X core protein
atggctcttacttgccgaatgcgcatacccattccaggatacagaggacgaccccgccggaggaaagggctgaccgggaacggtcgatttcggcggcgtagtatgcgcagacgcatgaagggtggggtgctgcccttcctaattccacttattgctgcggccattggagccgttcccggaattgcctcagtagccttgcaggcttctcgaaaaaattaa

SEQ ID NO: 250 - DNA, 1047 bp, Adenovirus A12
  MISC_FEATURE (1)..(1047): A12.orf00041 L2 protein V
atgcccagcatgaccaaacgcaagttcaaagaagagctgctgcaggccttagcgcctgaaatatatggcccatcggataaccttaccaagcgcgatatcaagcatgttaaaaaacgggaaaaaaaagaggaagaagtcgccgcggcgtcagcagacggcgtcgagtttgtgcgctcatttgcgcccagacgtagggtacagtggaagggacggcaagtaaaacgcattttgcgaccgggcaccacagtggttttttctcccggagagcgaacgattatgcgtcccctaaagcgcgagtacgacgaagtgtacgcagacgatgacattttggagcaagcggcacaacagactggggaatttgcatatggaaaaaaagggcgttacggagacaaaattgctattcctttggacgagggaaatccaacacccagtttaaaggctgtcactttgcaacaagtgttgcccgtccttgggccttcggaagaaaagcgtggaattaaaagggaagccatggatgaattgcagcctacaatgcaactgatggtgcctaagcggcaaaagttagaggacgtactagagcacatgaaggtggatcctagcgtacagccagatgtaaaagtacgtccgataaaaaaggtagctccaggattgggagttcaaacagtggacattcaaattcctgtgcaaactgcattgggtgaaactatggaaatccaaacttcgccaataaaaacaacggtgaacgcaagcgtgcaaacagacccttggtacccgccagtgctttcaacaaaaaaaaaaaagcgtcactacagacaaacaagttcgcttttgccagactacgttttacatccttccattgtgcccacgcctgggtaccgtgggacaacttttcagcgccgagccacagcccctagccgtagacgaggtccatcacgccgtagacgtcgacgcaaagccactttagccccagcggcagtacgtcgcgttgtacaaagggggcgcacactaatacttccatccgtgcgttaccaccctagcattctctaa

SEQ ID NO: 251 - DNA, 567 bp, Adenovirus A12
  MISC_FEATURE (1)..(567): A12.orf00042 L2 VII core protein
atgtccattttggtttcgccaagtaacaacacgggctggggactgggtgccgcccgcatgtatggaggagctaaaacaaggtctagccaacatccagtgcgcgtacgcggacattaccgagctccatggggcgcgcatacccgaggacgcactggtcgcaccactgtagacgatgttattgactcggtagtggccgatgctcgcaagtaccgcgcgcccgctgaaacagcagggtctactgttgatgcagtaattgatgaggtagtggcaaacgcgcgggcttatgcaaggcgccgcagacggctgcgtcgccggcgtagaccaaccaccgccatgcgcgcggccagagcgttggttcgacgggccaggcgcattgggcggcgagctatgatgcgggcagccaggcgggctgcaacgcctgccggtcgagcgcggagacgggccgcagctgcggccgcaacagctattgcaaacctagctgctccgcgacgaggaaatgtatactgggtgcgcgactcagtgaccgggacgcgtgtgccagttcgtacgcgtccacctcacccttag

SEQ ID NO: 252 - DNA, 1494 bp, Adenovirus A12; identical to SEQ ID NO: 161
  MISC_FEATURE (1)..(1494): A12.orf00043 L2 penton

SEQ ID NO: 253 - DNA, 1749 bp, Adenovirus A12
  MISC_FEATURE (1)..(1749): A12.orf00044 L1 IIIa capsid protein
atgcagcgaccggcgatcatcgcggagagggctcctaacctggatcccgcggttttggcggccatgcaaagccagccttctggcgttacagcttcagatgactggacagcggccatggatcgtattatggctttaacggcgcgcagtcctgatgcttttcgccagcagccccaagctaaccgcttttcggccattttggaagcagtagtgccgtctcgtactaaccctactcacgagaaagtgttaaccattgtaaatgctttgttggatagcaaagccatccgcaaagatgaggctggtttaatatacaacgctttgcttgagcgcgtggcacgctataacagtaccaatgtgcaggctaacttagaccggatgggtacagatgtaaaggaggcgctggctcaacgagagcgctttcatcgcgatggtaatcttggttcgctagtagcattaaacgcttttttgagtactcagccggctaatgttccgcgtggtcaggaagattatacaaacttcatcagcgccttgcgactaatggttactgaagtgcctcaaagtgaagtgtatcagtctggacccgattacttttttcaaacgtccaggcagggtttgcaaaccgtaaacttaactcaggcttttaaaaatttgcaaggtttgtggggggttcgtgctccagtaggcgatcgttcaactttgtccagtttactaacaccaaactcgcgcctattactgttgctaattgccccctttaccaacaccaacagtttaagtcgagattcatacctgggtcacttagttactttgtaccgcgaagccattggtcaagcgcaggtagacgaacaaacttatcaagaaataaccagtgttagtcgcgcactgggccaggaggacactggcagtttagaggccacacttaactttttactaactaaccgtcgccagcaagtgcctcctcagtacactttaaatgcggaagaagaacgcatattgcgctatgtacagcaatctgtaagtttgtatcttatgcgtgagggtgccacccccagtgccgccttagacatgacagcgcgcaatatggagccgtccttctacgcttccaatcgagctttcattaatcgcttgatggattaccttcaccgcgctgcggccatgaacggggaatactttacaaatgcaattctaaatccgcattggttgccccctcctggattttacactggtgaatttgatttgccggaaggaaatgatggctttttgtgggatgatgttacggacagtctgtttagtcctgcagttattggacaccatggtaaaaaggaagcaggtgatgaaggtcccttgcttgactctcgggcgagttctccattccccagtttaactagtttacccgccagtgttaacagcggtcgtaccaccagaccccgactaacaggtgaaagtgaatacttaaatgaccccatcttgtttccagtgcgcgacaaaaattttcccaacaatggcatagaaagtttggtagataaaatgtctcgctggaaaacatatgcacaagagcggcgagaatgggaggaaagacagccaagaccagttcgccctcctaggcaacgttggcagcgacgcaaaaaaggggcacatgcgggggatgaaggaagcgatgactcagctgacgacagtagtgtattagatttaggagggtcaggaaacccatttgctcatttgcgcccacagggttgcatagggtcattgtattaa

SEQ ID NO: 254 - DNA, 1122 bp, Adenovirus A12
  MISC_FEATURE (1)..(1122): A12.orf00045 L1 52 kDa protein
atgcatcctgtcctgcgacaaatgcgacctcagcccagggcaaccacggcctcagcagcggtggcgctttcgggctctggcgaacaggaagagcctcaatgtcctacattggagttggaagaaggagaaggcatagcccgattgggcgcccactctcctgagcgtcacccaagggtgcagctcgcccgggacagtcgcgtggcatttgtgcctcgtcagaacatgtttcgcgacaacagcggggaggaagctgaggaaatgcgagactgcaggtttagggccggtcgcgagctgcgccgcggatttaatcgcgagcgactgctgcgtgaggaggactttgagccagatgaacattcggggattagttctgcacgggcccatgtatcagcagccaacttagtaacagcatatgaacaaacggttacagaggaacgtaactttcaaaaaagctttaataaccatgtgcgcacactaatagcgcgagaagaagtagccattggtttaatgcatctttgggactttgtagaagcttatgtacataatccagcaagtaaacccctaactgcccagctgttcttaatagttcaacatagtagagacaatgaaacttttagggatgcaatgcttaacatagctgaaccccagggtcggtggttactcgatttaattaacattctgcagagcattgtggttcaggaacgcagtcttagtttggcagacaaggtggccgccattaattactccatgttaagtttgggaaagttttatgctcgtaaaatctacaaaagtccgtatgttcccattgacaaggaagtgaagatagacagcttttatatgcgcatggctttaaaggtactaacattaagcgacgatcttggagtgtaccgcaatgaccgaatccacaaagcagtaagcgccagtcgccgcagagagctaagcgacaaagagcttatgcatagcttacaaagggcgctgacgggagcaggaacagaggacgagtcgttctttgatatgggcgcagacctacggtggcagccaagcgctcgcgctttggaggcagctggagtggcgtctgctgacgtcactggcgatgacgatgacgaagaccagtacgaggactga

SEQ ID NO: 255 - DNA, 135 bp, Artificial Sequence
  A12.orf00046 hypothetical protein
atggaaaaaatgaaagttggtaagcgactcccttccgtggtttggtggaaaagtcacaagggtaccatagcgaggaaccccggttcgaaaccggcaggatccgctatgagcacaagtgaggcgcttgcgcgttga

SEQ ID NO: 256 - DNA, 1881 bp, Artificial Sequence
  A12.orf00047 E2B terminal protein
gtggcaactattgaacgctttttacccctgcgcaatatttggaaccgagcccgcgaatttatgcgagcaacaactaccgctgccggcatcacatggatgtccagatacatatatgaataccaccgcctcatgttggaagatctcgctccaggtgctgcggctacgcttggctggccgttgtatcgcgaacctcctcctcatttccttgtgggctatcaatacctagtgcgcacctgcaatgactatgtttttgactctcgggcttactcacgcttgcgatacacagaaactgtacagccaggcacgcaaactgttaattggtcagtaatgacaaactgcagctacaccattaatgcaggagcttatcaccgctttgtagatgtggatgactttgcaaccacccttacccaaattcaacaggcagtgcttgcggaacgggtagtggcagatttagctttattacaaccgctgcaaggctacggaagcacgcacatggctgatcgcggaaaccgcgaggtagaggtggaaaggttaatgcaagactactacaaagatcttggacgatgtcaaagtgacgtgtggggaatggcagaccgcctgcgaattcaacaagccggacccaaagatgtggtgcttcttaaaaccattcgtgggcttaaaacagcttacttcaattacattattagtagcattgctcagcttcctggtactttagaagaaacaaaacttagcctaccttgtgactgtgactggctagatgcctttcttgaaaggttctccgacccggtggatatgcagacgcttagctccttgcgcggagttcctacgcagcaaataataaaatgcataatcagcgctgtatccctacctaacgcccctcgcaacgcctcatttcccattttacatgaaacagaacttagaggtggagtttttgagttacgaccacgtgaaaacggtcgagcagtaaccgaaactatgcgccgccgtcgcggcgaaatgattgaaagatttgtagacaggctgcccgttcgccggcgtcgaagaagacaacccccaccacctgtggtcgaggaagaaataatggaggtagaagaggaagaacaagaaatagttccgggcgcatttcagcaagaagtgcgcgagacggtggccgagcttattcgtctgttggaagaagaattgacggtggcagctcgcaactcccagtttttcaattttgcagtagacttttacgaagccatggaacgtcttgaagccttaggtgacatcaacgagctgacgcttcgtcggtggattctgtatttcttcgtctcagaacacgttgccaccaccttaaactacctgtttcagcgcttgcgcaactacggcgtgttcgcacggctcgtggaactcaacttggcgcaagtggttatgcgcgctcgggacagcgaaggaggggtagtatacagccgagtctggaacgaaattggactaaacgcattttcacagcttatgagtcggatatctaatgaccttgcagccactattgaacgtgcgggacatggagacctccaggaggaagaaattgatcaattaatggcagaaattgcctaccaagataactcaggcgacgttcaggagattttaagacaggctgcagtaaatgacactgagattgattctgttgaactttctttcaggttcaaaacaacagggccggtagtgtttacacaacgccgacagattcaagatatcaatcgccgggtagtcgcccatgccagtcaacttcgggctcaacaccttcccctgccagagcgtcaggccgacataccgcttcccccgcttcccgcaggacccgaaccgccgcttcctccgggagctcgtccgcgccgccgattttaa

SEQ ID NO: 257 - DNA, 3186 bp, Adenovirus A12
  MISC_FEATURE (1)..(3186): A12.orf00051 E2B DNA polymerase
atgcttttctctctgactgataccatggacagctccaggctgtacgccctgatttcccgtttccgcccctctcgtgctgaaatctggacatgcagctcgaggggcaccgtcaccctctccgttctcgctttcgaggatccaaacggtagtggcaatgcagcagaagaggaagaggacgaacggcagctgccaagtggtattgattttcccatctgctttctggtgcgaggccgccaggtacacctcattcaacagatacagcccgtgcaacgatgcgaacactgcgcacgcttttacaaacatcagcatgaatgctctgtccgccgacgagatttctactttcatcacatcaacagccattcttccaactggtggcaggagatccactttttcccaatcggttcgcatcctcgcactgagcgcctttttattacctatgatgtagaaacctacacctggatgggggcatttggaaagcaacttgtcccatttatgctggtgatgaaactgtctggggatgacaatcttgtcaaacatgccttacaacttgcattagaacttggatgggaccaatgggaaaaagactctactactttctactgcttaaccccagaaaaaatgaaggtcggtcaacagtttcgtacctatagaaaccgcttacaaacctccttagctactgatctttggatgacttttttacaaaaaaatccacacttgtctcaatgggctcaagaagaaaacggactagtcgcgcttgaagatctttcctacgaagatcttaaaagagcccctgcaattaagggtgagccaagatttgtagagttgtatatagtaggacacaatattaatggatttgatgaaattgttcttgccgctcaggtaatcaataaccgcttggacgtccctggaccctttaaaatttctagaaattttattccaagagctggcaaaatattatttaatgatattacttttgcccttcccaatccccactacaaaaagcgaactaacttcctactgtgggaacacggagggtgtgacgaccaagattttaaataccagtatttaaaagtaatggtcagagatacctttgctcttactcatacatctttaagaaaggctgcacaagcgtatgccctgcctgtagaaaaaggatgttgtccgtacaaggcggtaaatcagttttatatgcttggttcttaccgtgcagatgcaaatgggtttcccctggaggagtactggaaggataaggaggaatacctcctaaatcaagaactatggaaaaaaaaaggagaaaaaaattacaatcttatcggggaaacattaaactattgtgccctggatgtacttgtgactgcctcattggtagaaaaactgcgtagctcatacgcccagtttgttactgacgcagtgggtcttgacgcggcacattttaatgtgtttcagcgtcctaccatttcctctaactctcatgcaattttcagacaaattttgtaccgcgccgaaaaaccacagcgcacacatcttgggcccaacatcctggcgccttcacatgagctatatgactacgttcgcgccagcattcgtggcggcaggtgctatcctacttacataggagtactaaaagagcccatatatgtatatgatatttgcggcatgtatgcatcggccctcacacaccccatgccttggggtcctccccttaacccctatgagcgggcattggccgtgcggcaatggcaggtggcgctggaaaattacacttgcaaaattgattattttgacaaaaatctttgtcctggcatttttactatagatgccgaccccccagatgaaaatcagttggatgttcttcctcctttttgttctagaaaaggcggtcgtttagcctggaccaatgaaagcttgcgcggtgaagtagttaccagcgtagatctggttacactgcataatcgcgggtggcgcttacgcttgctatctgacgagcgcaccaccattttccccacctggaaatgcctggcacgcgaatatgtgcaactcaatattgccgcaaaagaacgggccgatagggacaaaaatcaaaccctaagatctatagccaagctgctttccaatgccttgtacggatcttttgctaccaaactagataacaaaaaaatagttttttctgatcaaatggaagaaagcctaatgaaagaaattgcagcggggcgattaaacatcaaatcctcatcgtttatagaaactgacacgttgagtacagaggtaatgcctgcctttgagcgcgtgtactcacccaaccagttggcgctcgtaaacagcgaagcagaagaaagcgatgaagaccaaggacccgcccctttttatagcccaccaccagaaaattgtgaacacgtgacttacacctacaaaccaatcacattcatggacgctgaagaaggagacatgtgtttacacaccttagaaagttctaaccctttaattaacaacgatcggtacccttcccatgtggcttcctttgtacttgcttggactagagcttttgtgtcagagtggtcagaattcctgtacgaggaggaccgcggaataccactgaaggatagaccccttaaatctgtatacggagacactgacagtctttttgtcacagagaaaggacgccgccttatggagtcgcaaggtaagaaacgcatcaaaaagtacggagggaaacttgtttttgatccatcatgtcctgagctgacctggtcagttgaatgtgaaactgtttgtagttattgtggcgcagatgcttattctccagaatctgtttttttggctccaaaactgtacgcccttaaatgccttcagtgtcctcactgcgggagcacctccaaaggaaaaatacgggctaaaggccacgctacagaggctttgtcttatgatcttatgttaaaatgctaccttgccgaagcacagggagaagacacgcgcttcagcaccagccgcctcagtttaaagcgcacactggccagcgctcaaccaggagcgcatccattcaccgtgaccgaaacaaccctgacgcgcacattacgtccctggaaggacaaaaccctcgtccatttggatgctcaccgcctcgttccttacagcaacagccagccaaacccccgcaacgaggaagtttgctggatcgagatggcatag

SEQ ID NO: 258 - DNA, 1053 bp, Adenovirus A12
  MISC_FEATURE (1)..(1053): A12.orf00052 IVa2 maturation protein
atgcctatggccgatggcctaaagccacttaaaaatttcaaatctttacaagagttactttccttaggcggagagcgtctgttaggggaactggccaagcaaaacatccgcgtccgacaaatgatgaatgaagtggctccgcttctccacgaagacggcagctgcacctcgttaaactatcacttgcaacctgtaattggggtaatttatggacccactggctgtgggaagtctcagttgttgcgtaatttgctttctgcccagctggttacacctgctccagaaactgttttttttattgttccgcaagtggacatgattcccccatctgaaattaaatcttgggaaatgcaaatttgtgagggaaattatgtcccaggaccagagggaactattattccacaatctggaacgctgtgtcctaaatttgttaagttgtcctacgatgacctaactctagaccacaactatgatgtttctgatccagaaaacatttttgctcaagccgctgctcgcggtccaattgccataataatggatgagtgtatggaaaatttgggaagtcacaaaggcgtttccaagtttttccatgcctttccttctaaactccatgacaaatttcccaagtgtactggctacaccgttttcgtggttctccacaatatgaatccaagaagagatttggcaggtaacattgccaatctcaaaatacaatcaaaacttcatatcatgtcacctcggatgcatcccacccagcttaaccgttttatcaatacctatactaaaggtcttccattagcaattagcttgttgttaaaagatatatttaatcaccatgcccagcgttgttgctatgactggattatctacaacactaacccggaacatgaagcccttcaatggtcctaccttcatcccaaagatggcctaatgccaatgtaccttaatatacaggctcatctttacaaaatactggaacacattcaccgtgttcttaatgatagggaacggtggtcaagagcttaccatgtcagaaaaaacaagtatcaataa

SEQ ID NO: 259 - DNA, 435 bp, Adenovirus A12
  MISC_FEATURE (1)..(435): A12.orf00053 IX protein
atgaacggaactactcagaacaacgctgcgctttttgatggaggggtttttagcccttatttgacttccaggttaccatattgggccggagtacgtcagaatgtggtaggatctacagtggacggtcgacctgtggcacctgcaaattcatcaacattaacctatgcaactattggaccctcgcctttggataccgccgccgccgctgcagcttccgcggccgcttctacggctcgcagtatggcagctgatttcagcttctacaatcacttggcttcgaatgctgtgacacgcaccgcagttcgagaggacattctgactgttatgcttgccaagcttgaaactctaactgctcagctggaagagctatcgcaaaaggttgaggaattagctgatgctactacccataccccagcccaacctgtaacccaataa

SEQ ID NO: 260 - DNA, 1449 bp, Adenovirus A12
  MISC_FEATURE (1)..(1449): A12.orf00054 E1B large T antigen
atggagcgagaaatcccacctgagttgggattacatgctggattacatgtcaatgcagctgtggagggcatggctgaagaggagggtttgcatttactcgctggcgcggcctttgaccatgccgccgctgccgacgttgcaagaggagaaggaggaggagcggaaccctgcggtggtggagaagtaaacatggaacaacaggtgcaagaaggccatgtacttgactctggcgaagggcctagttgcgcagatgatagagataagcaggaaaaaaaagaaagtttaaaggaagctgctgttcttagtaggctaactgttaatctgatgtcccgcccgcgtttggaaactgtatattggcaggagttgcaggatgaatttcagcggggtgatatgcatttacagtacaaatacagttttgaacaattaaaaacccactggttagagccatgggaggatatggagtgtgctattaaagcttttgctaaattggccttacgtcctgattgtagctacagaattactaaaacagtaaccattacttcatgcgcctatattataggtaacggggcaatagttgaggtagatacaagcgacagagttgcttttagatgtcgaatgcagggtatgggcccaggggtggtgggtttggatggaattacatttataaatgttaggtttgctggagataagtttaaaggcattatgttcgaagctaatacctgtcttgtcttgcatggtgtttactttcttaactttagtaacatttgtgtagagtcttggaataaggtttctgctaggggctgtactttttatggatgttggaagggtttggtgggtagaccaaaaagtaaactgtctgtaaaaaagtgtttgtttgaaaaatgtgtacttgctttaattgtagagggggatgcacatattaggcataatgcagcttcagaaaatgcctgttttgtattattgaagggaatggctattttaaagcataatatggtttgtggggtgtctgatcaaactatgcgacgttttgttacctgtgctgatggaaattgtcataccttaaaaactgttcatattgtgagccacagtagacattgttggcctgtatgtgatcataacatgtttatgcgctgtaccatacatttaggcttaaggcggggtatgtttagaccttcccaatgtaacttcagccactcaaacattatgctggaacctgaagtgttttctagagtgtgtttaaatggggtatttgatttatctgtggaattatgtaaggttataagatataatgatgatactcgacatcgttgccgacagtgtgagtgtggtagcagtcatctagaacttcgtcccattgtgctaaatgtaactgaggagctgagaagtgaccaccttaccctgtcttgcctgcggactgactatgagtcaagtgatgaagacgacaactga

SEQ ID NO: 261 - DNA, 261 bp, Adenovirus A12
  MISC_FEATURE (1)..(261): A12.orf00057 E1A 29.5 kDa protein
gtgaaaaataatattttgttgtttttaggtcctgtttccgataatgagcctgaacctaatagcactttggatggcgatgagcgaccctcacccccgaaactaggaagtgcggttccagaaggagtaataaaacctgtgcctcagcgggtgactgggaggcgtagatgtgctgtggaaagcattttggatttgattcaagaggaagaaagagaacaaacagtgcctgttgatctgtcagtgaaacgccctagatgtaattaa

SEQ ID NO: 262 - DNA, 597 bp, Adenovirus A12
  MISC_FEATURE (1)..(597): A12.orf00058 E1A 29.5 kDa protein
atgagaactgaaatgactcccttggtcctgtcgtatcaggaagctgacgacatattggagcatttggtggacaacttttttaacgaggtacccagtgatgatgatctttatgttccgtctctttacgaactgtatgatcttgatgtggagtctgccggtgaagataataatgaacaggcggtgaatgagttttttcccgaatcgcttattttagctgccagtgaggggttgtttttaccggagcctcctgtactttctcctgtctgtgagcctattgggggcgaatgtatgccacaacggcaccctgaagatatggatttattgtgctacgagatgggctttccctgtagcgattcggaagacgagcaagacgagaacggaatggcgcatgtttctgcatccgcagctgctgctgccgctgatagggaacgtgaggagtttcagttagaccatccagagttgcccggacacaattgtaagtcctgtgagcaccaccggaatagtactggaaatactgacttaatgtgctctttgtgctatctgcgagcctacaacatgttcatttacagtaagtgtgctatgggaggtgggaggtga

SEQ ID NO: 263 - DNA, 120 bp, Artificial Sequence
  A12.orf00059 hypothetical protein
gtggggcgcggcgtgggagccgggcgcgccggatgtgacgttttagacgccattttacacggaaatgatgttttttgggcgttgtttgtgcaaattttgtgttttaggcgcgaaaactga

SEQ ID NO: 264 - DNA, 132 bp, Artificial Sequence
  A18.orf00001 hypothetical protein
atgaggaagttgggcgcggcgtgggagccgggcgcgccggatgtgacgtgtcgtgagaacactgtattgtgccgagtcatatgcggaagtgtattttttcgcgggcttttgggggttttttgtgttgtgtag

SEQ ID NO: 265 - DNA, 384 bp, Adenovirus A18
  MISC_FEATURE (1)..(384): A18.orf00002 E4 ORF1 protein
atggctgctttacaggctctgtatgtgtattttaagggacctggggctatgttgcctgaacaagaaggttattctaacgcttatgtgttattttctcctgcgaattttgttatacctccgcatggagttgtgcttttatatttgcatatagcagttgatattcctcctggatatttgggaacattattttcattgagcgacatgaacgccagaggggtttttgttggcgctgaaacgctttatccaggctcaagaatggagcttagtgttttgctgtttaatcattccgacgtgttttgcgatgttcgcgcaaagcagccagtcgcgcgcttgcttttaagtagagttatttttccacccgttcgccaggcatctttactttaa

SEQ ID NO: 266 - DNA, 336 bp, Adenovirus A18
  MISC_FEATURE (1)..(336): A18.orf00003 E4 ORF2 protein
ttgcatgacttaaattttgaggtggtggcgtttcttaaagacgtgctacctgagttttggctgctggtaatgcattatttaactcctcctatgcgcgatgtctacgttggtgccacgcttactaatatgggcccatttgtgcaagttgtatgttctgtgggaactccggaacttgtacctggaggtgaactttctttgctgctggcttctgatttgcatgattttatacaattggcattaaggtgtcagctgcgagaccaaggtgtggagcctaatgtaaatctactgaatttactgcaggtgtttgaagatccagacttttttcagcaaatatga

SEQ ID NO: 267 - DNA, 351 bp, Adenovirus A18
  MISC_FEATURE (1)..(351): A18.orf00004 E4 ORF3 protein
atgaagtactgcctgcggatggcggtggagggcgcccttacagagctttttaatattcatggtttaaacctgcaaaatcaatgtgttcacataatacaacaatggaagaatgaaaattacctgggaatggttcagtcaggcagtttgatgatagaagagtttcatgataatgcatttgctttgcttttgtttatcgaaatcagagctgtggctcttttagatgctgttgttgaacatttggaaaatcgcttacaatttgatctggctgtgatctttcaccagcacagcggaggcgatcgctgccacctgcgagatttacgcattcaaatccttgctgaccgtcttgattaa

SEQ ID NO: 268 - DNA, 117 bp, Adenovirus A18
  MISC_FEATURE (1)..(117): A18.orf00005 E4 ORF4 protein
atgcgtagcagagtatccacacaggtcgcatgggctaaaccaagccatgctatgcaagcagccgtgtcccgacttacaggaggaggaggaatacaaggcagaggcataaaaacttaa

SEQ ID NO: 269 - DNA, 876 bp, Adenovirus A18
  MISC_FEATURE (1)..(876): A18.orf00008 E4 34 kDa protein
atgcagcgcaacagacggtatccgtacagattggcaccgtacgggaagtacccgttaccaccttgtgaaaaggagatgagagcttctttgtttggacctgagaattcttcagtttctgagtgtaacagtttaaccttacataatgttagtgaggtaaggggcattccttcatctgtatgctttactgtattacaagagctaccagtgccatgggatatgattttaagtaggtatgaaatgtttatattaaagaagtacatgagcgtgtgtatatgctgtgcaaccatagatgtagagagaacccaattattacatggttatgagagatggtttattcattgtcactgtaatcgcccaggttcattacagtgtaaggcagccggttctttgttagcatggtggtttaaaatggtagtgtatgggtctttaattaataaaagatgcttttggtatagagaagtagtgaatcggtttatgccaaaagaggtgctgtatatgggaagcatttttgttagagggaaacacttgatttatattaaaataatgtatgatggtcatgtcggattggtgttagaaaaaatgagttttggatgcagtgcatttagctatggatttttaaataacatgctggtattatgctgtagctattgtaaggatttaagtgagatacgtgtgcgctgctgtgctcgtcgcacccgtttattaatgataaaagctttacaaatcattatgaaaagtacttctcgttccttgaaacatagccgagtagaaattcagcgtcagcgattactaaagggtattattatgcaccaccgacctgtgctgtttgaagaatatggacaacgtgaaaatccttgggctgctgatggacactga

SEQ ID NO: 270 - DNA, 228 bp, Adenovirus A18
  MISC_FEATURE (1)..(228): A18.orf00010 E4 ORF 6/7 protein
atggacctggtactggatggggaaagttacctaagtgactgtgtgggcgaggggtttgtttctatcattgatcatcgctttgctcggaaggaaactatttggactgtgacacctaagaacctaagtagaaacatgcacatgcagctgttttcggctataaagggggaaagggtggtgtataaaataaaatgggaaggaggcggaagtttaacaacgcgcattgtgtaa

SEQ ID NO: 271 - DNA, 1761 bp, Adenovirus A18; identical to SEQ ID NO: 130
  MISC_FEATURE (1)..(1761): A18.orf00013 L5 fiber protein

SEQ ID NO: 272 - DNA, 159 bp, Adenovirus A18
  MISC_FEATURE (1)..(159): A18.orf00014 U protein
atgaagatggtgggtaggggttgggaggaagaatctgatattccatttaaggtttggaggaagtttgctatttgtaaatctgtcaagtatgacagttgggaagagggaaaacttataagagtacacggagaccacgatatattttcagattttcggtaa

SEQ ID NO: 273 - DNA, 387 bp, Adenovirus A18
  MISC_FEATURE (1)..(387): A18.orf00016 E3 14.7 kDa protein
atgattgaagctgatttagaagtcgatggaagaattaccgaacaaagacttctcaccaatcgcgctaggcaacggcagcaggaacaaaaacacaaagagcttcttgatttgcaaaccgtacaccagtgtaaaaaaggacttttttgtttagtaaaacaagctacactcacttatgagttattatcaggcaaagaacaccagttaagctatgtgttgcccattcagcgccaaacctttactgcaatggtgggttctgtacctattaaagtgtcccaacaagcaggagagcaagaaggctttattcgttgcctgtgtgataatcctgaatgtttgtacactttaataaaaacactgtgcggtttaagaaatcttttaccaatgaattaa

SEQ ID NO: 274 - DNA, 333 bp, Adenovirus A18
  MISC_FEATURE (1)..(333): A18.orf00017 E3 RID-beta protein
atgaagttaccgttagccttcctttttttctttgtgccaattagggcaacaccttgtgaattgcacaagccatgggattttttggattgctacaccaaagaaacaagctacataggttggatttatggaataatgactggtttggtttttatttccagtgtaatagctttacaaatgtatccgcgccttgattttgcatggaaacgatacactgatgatcttcccgaataccctaatcctcaagttaatctaccacaaaatattgtgtttccagaacccccacgtcctccttctgttgttagttactttaaactcaccggtggagatgattga

SEQ ID NO: 275 - DNA, 276 bp, Adenovirus A18
  MISC_FEATURE (1)..(276): A18.orf00019 E3 RID-alpha protein
atggtgacggttctcttcatctttttatgcctaccaattatttttgcctcttcaacttttgcatccgtcagtcacatcaatcctgactgtttaactccatttacagtgtatttaatttttgcatttgtaactgctacctgcgtctgcagtcttattaccctgctaattacatccttgcaattttttgattattactacgttcgatttgtttatcgcagacaccacccgcattatcaaaacccccaaattgcagcccttcttcagttgcaaccatga

SEQ ID NO: 276 - DNA, 810 bp, Adenovirus A18
  MISC_FEATURE (1)..(810): A18.orf00020 E3 CR1-beta protein
atgcttcacatcttaattttgttcttttctctaactcccattgtttatgcccaaacagcagagagaccactaaaggttgtggctgaagctggtcataatgtcacacttcctcatttgctgcctggatttaacaaaactggtcatgtaacttggttaatagaaataccagactatggctcagccccttcaaacaaatttgtttttagcggacaaaagctctgtgagtttgccagcaaaaacctaacgtggtcttttccacaattaatttttaaatgtgacaattatgacattaccctattttggcttaaaattgaaaattcggctatttacaatgtaaaaaacacaatagaagccaccgaaagcaatatatactatcagttaacagtaatacaaattaatccgcccaactgtatcatcacttccaaataccttacagaagattattgtcacattacaattaattgtacaaactctcgctatcctaacaaggttatctttaacaatgtcactagatcttattatggttatgctaaaggcagttctacgcttcccaactactttacaaccagctttaatgtttcaggtatcactaaaacatttaagcataactatccttttagtgagctatgtacttatccgtcttccgaaaatttctacaattcaaaagaaacagtaagcaccatagtctttatagtaataattggctttagtgttcttattattctgggtgccctaatttatctttgttggcatcgcaggtttctttatagatctaaatcagaaccttgtgtacaattaaatgcttactag

SEQ ID NO: 277 - DNA, 798 bp, Adenovirus A18
  MISC_FEATURE (1)..(798): A18.orf00021 E3 CR1-alpha protein
atgaagatttttgttgtcatttgtgtactgaatttaataaattgtagtggcgctttgtcacctgaagaggaacctaattgtcgtccgcctctaactaatatcaaagttgtactttcaaccactcacgttacccttcaatgcaagtttttttctacacaactcacttggacctttaatggaaaaaacgtcgccgaggcaaatttaaagtaccatatcaacaaagaaaacattaccttgcattcgcctattcacctgggatattaccgctgctttgccacaccttgtgtgcaagcgttttttctggctccagttatcaaccctcgtcctgcaactactgctcagcctgaaaaaattaccaagttgatttccaccgctattgctactactgctacaaaaggtacagaagaaatcatatacttttcaaactttacaactaatttacttttaaattgctcgtgctctaactcacttatttcgtggttcgctaacaacaccttctgcaaagctttttttcaaggaacaactttgtattcggctaaacttgaactttgtaacaccagcactccttctaaccttactttgttacctccttttgttgccggccgttatttctgcataggagcaggcgggcatccttgtcagcggcattggaaattagtttttcgtccaacgctggttttacctacgtctgctgatcctactctgtccccaacccctaatttttggcttgaatacagcggacttatagcttttactttatttttactttgcaatttattcttaattaatttttactaa

SEQ ID NO: 278 - DNA, 318 bp, Adenovirus A18
  MISC_FEATURE (1)..(318): A18.orf00022 E3 12.5 kDa protein
atgtctaatggaacagctgacacagctcggctgcgacatttagaacattgtcgccgacttcgctgctttgcccgagacgtgtgtgattttgtttactttgagctccccgaggaacatccccagggacccgctcacggtgtaagggtaacagttgataaaggaattgatacccaccttattaagtttttcaccaaacgtccacttttggtggaaaaggaccaaggaaacactgtactaactttgtactgcatttgttcagttcctgaattacatgaagatttttgttgtcatttgtgtactgaatttaataaattgtag

SEQ ID NO: 279 - DNA, 705 bp, Adenovirus A18
  MISC_FEATURE (1)..(705): A18.orf00023 L4 protein VIII
atgagtaaagaaattcccacgccttacatgtggagcttccaaccccaaatgggtttggccgcaggtgcggctcaggactactccagcagaatgaattggctaagcgccggtcctcatatgatttccaaagtaaacggaattcgcgcccagcgtaaccaaattctgctggagcaggcggctctcacggccaccccgcgtcatcaattaaaccctccctcttggccagctgccctggtataccaggaaaatcccccgcctactactgtacttttaccccgcgacgcccaggccgaagttcacatgactaacactggggcgcagctcgcgggcggcgcacgtcacagtttcaggtgtaaaggtcgctcctggccctaccccacttcaggtataaagcgactgctcatcagagggaaaggtatacagctcaacgacgaggcagtcacatcgtcactgggtctcagaccagacggagtatttcagctcggaggatccggtcgctcctcctttactacccgccaagcctacctaacgctgcagagctcctcatccgctcctaggtccggcggcatcggaactctccaatttgtggaggagtttactccatcagtttacttcaaccccttttcgggttctccaggccactacccagacgccttcatccccaacttcgacgcagtgagtgaatctgtggacggctatgattaa

SEQ ID NO: 280 - DNA, 336 bp, Adenovirus A18
  MISC_FEATURE (1)..(336): A18.orf00024 L4 33 kDa protein
atgtcctgcattactaccgtaatctttacagccccttcgaagcgcccaacaaagaagcaacctgcggcgaccaagcggtccattagaaaaagaagcaacaacaacatcgaagaaagtcctgagacgcgcgagctaagaaaacgcatttttcccactctatatgctatttttcagcagagtcgaggtcaagaacacgaactgaaaataaaaaaccggtccctgcgttcgctaacccgcagctgtctttacctgaaaagcgaagaccagttgcagcgcaccttggaagacgcagaagctctgttcaataaatactgcgctctctcgcttaaagactaa

SEQ ID NO: 281 - DNA, 2364 bp, Adenovirus A18
  MISC_FEATURE (1)..(2364): A18.orf00028 L4 100 kDa protein
atgatggaactccaaccacagggaagtttaaccaccccaagcgctcccgccatctgcactactgctgtcatggaaaaggaaaacagcctacccataccccaggacgcaccggtggagcaggacttgggctacgtgacgccccccgaagagtggcatcaaccagactctcttctaaaccaaaatcagccaaatgaggaacaggcagaaagcaatgaacaaaatgccgggttaaagaatgactacctaggcgagggagatgtcctgcttaagcatctgcagcgacaaaccactatcgtacgcgacgctatagccgaccgcttgtccttgccaatttcagtttcagagttaagcagtgcatacgagcggaatttgttttccccacgtgtgcctccaaagcgacaagccaacggcacatgcgaaccaaatccccgccttaacttttatccagtttttgcagtgccagaagcacttgcaacatatcatatttttttcaaaaatcacaagatccccgtgtcctgccgagccaaccgcacccgcgcagatgaactttttactttaaggtccggcgccgccatacctggtattgtatccttagaggaggtacccagaatttttgaaggcttgggacgtgatgaaaaacgagcggcaaataccctgcaaaaacaaaacgaacaaagtcagtacggaactagcgccctggtagagctggaaggtgacaacgctcggttggcggtactgaagcgaaacgttgcagtgacccactttgcctatccggcgctaaatcttccaccaaaggttatgagcgcagtaatgaatcaggtattaattaagcttgccaaaccaattgatgaacaagcaaacttgcaagatactgaaacaacggacgatggaaaaccagctgtaagcgacgaacagctatcaaggtggttggggacaaacgatagtaaggaactagaacatcggcgcaaattaatgatgggcgctgtactaataactacagaacttgagtgcatgcaccgctttttttctaacagtaccatattgcgtaaaattgaggaatgccttcactataccttccgccatggctacgtgcgccaagcttgtaaagtgtccaatgtggaattaagcaatctagtttcttacatgggcattttgcatgagaaccggctcggtcaaaacgtcctccactctacccttagcggcgaagcgcgcagagactatgtgcgcgattgcatttatctgtttctactgcacacctggcaaaccggcatgggggtgtggcagcaatgcttggaagagcgaaacttgcaagaactacataaactccttgacaagtcgctgagatgcctttggacaggctttgatgaaagaacggtagctgccaacctcgccgacattatttttccagaaaggctattgattaccctgcaaaacggactgcctgatttcatgagccaaagcatgctgcacaattttcgctcttttattttggagcgatctggcatgcttcctagcatgtgttgtgcgctgccttcagattttgtacctatttactttaaagaatgtcctcctcccctgtggagccattgctacctactacaactggccaactacctagcctatcactcagaccttatgacagactccagcggtgagggtctaatggagtgtcattgtcgctgtaatctgtgcacccctcaccgttccctggtttgtaacacagaactactgagtgaaagtcaacttataggaacctttgaaatgcaggggccgcagtctgacaacaacaccgcaacaagtttcaggctcaccccagggctatggacttcagcgtatctgcgtaaatttgagcccgaagattaccacgcccatactatacatttttacgaagaccaatccagacccccaaaggctccgttaacagcttgcgtcattacgcagggaaagattttagcccaattgcaagctattaagcaagcgcgcgaagagtttttacttaaaaaaggacacggagtgtaccttgacccccaaaccggcgaggaactcaatcttccatcaccttcctgtgctaccacgtactcttcacatccacagcatgcccccgaaagccgccaaacaggccattgctctacaacgttcaaagaaacagcagcaacagcaggaaatctgggaggaagaatcttgggagagtcaggcagaggaggacgaggacttggaagaatgggaggaggaggaggaatacaacagcctagaagaggaggaggaaggtatcgaggacggagcgaccgccacaaaaccgtcgctttcaaccgaggcctccccaccgaaccccacagtgagcaaatctcaaaaagccagccgtag

SEQ ID NO: 282 - DNA, 1461 bp, Adenovirus A18
  MISC_FEATURE (1)..(1461): A18.orf00031 E2A DNA binding protein
atggccagcaatcaacactcacagagggagcgcaccccagatcgcagtgttcagccgccgcctccaaaaatgggccgttactttttggattccgaaagcgaggaagacatgggagctcctgcgcctctgccttcaaaacgaaagatgaagtccgcaaagcctcttcctccgtcgccagagattgttttagacagcgaagaagaggaaggagtagtggaaacgccaaaggcagtcttaggaataatgggattcagcatgccccctgttcgcattatacctcatgcagacgggtcgcagtcttatcaaaaaatggaggtcaacaaacgaaaccccgcaaatgccgcaatgcaaataagcagtgaagaaagttttgttgtccgaaatcctgcgaacgagcccctagtaacggcttgggagaagggtatggaagccatggctatgcttatggagaagtaccatgtggatcatgacgagcgttccaactttagatttttgccagaacagagtggcatatacaaaaaaatatgcgcaacctggattggcgaagaaaagcgcggattgcagctaactttttcatcccaaaaaacgttccaggagctaatgggccgcttcttgcaaggatacatgcaagcatatgccggcgtacaacataaaacctgggaacccaccggttgctgtgtgtgggagcatcagtgcaccgagcgggagggagagcttaggtgtttgcatggcatagaaatggtgcgtaaagagcacctggtagaaatggatgtaaccagtgaaaatggccagcgggcgttgaaagagaatccgtctaaagctaaggtggtacaaaatcgctggggtcgcaatgtagtgcaaattaaaaacgatgacgctcgctgctgtttccatgatgtcggctgcggaagcaactctttttccggaaagtcctgtggcttgtttttctctgaggggtcaaaggcccaaatggcttttaaacagatcgaagcctttatgttggccgactaccctcacatgcgacaggggcagaaacgcgttcttatgccagtgcgttgcgagtgtttaagcaagcaagatggtgtaccacggatggggcgacaactctgcaagatgacgccgtttacccttagcaatgtagaaaacattgacactggcgaagtaaccgacccaggggcgttagccagcattcactatccttgcttgctggtttttcagtgtgcaaatcccgtttaccgcaacacccgcggtaatgccgggcccaattgcgacttcaagatatctgctcctgatgttatgggcgccttgcaacttgcgcgccagctgtggagagaaaattttgaaggcccgcttcctaggcttgttattccagaattcaagtggcacccgcgtctgcagtacaggaatctatccctacctactaatcatggcgactttcgcgaagaaccgtttgatttttaa

SEQ ID NO: 283 - DNA, 615 bp, Adenovirus A18
  MISC_FEATURE (1)..(615): A18.orf00032 L3 protease protein
atgggttcaagcgagcaggagctcacggccattgttcgagacctaggttgcgggccctattttatgggtacatttgacaaacgctttccaggttttatatcccgcgaccgcttatcctgtgctattgttaacactgctggtcgcgaaactgggggcgtgcattggcttgcttttggatggaaccccaaatctcatacatgctatttatttgaaccatttggattttctgacaagcgtctaaaacaaatatatcactttgagtacgagggactgttgcgccgcagcgcactagcagccactaaggaccgttgcgttaccctacaaaaatcaactcaaagcgttcaaggaccattttctgcagcttgtggccttttttgctgtatgtttttacatgcttttactcattggcctgaccacccaatggataaaaatccaactatggacctacttactggagttcctaactgtatgttacaaagtcctcaggtagtaggcatactgcagcgcaaccaggaggagttgtatagatttttaaacaccctatccccttactttcgtcacaaccgcgagcgcatagaaaaggctacgtcttttactaaaatgcaaatgaactga

SEQ ID NO: 284 - DNA, 2760 bp, Adenovirus A18; identical to SEQ ID NO: 190
  MISC_FEATURE (1)..(2760): A18.orf00033 L3 hexon protein

SEQ ID NO: 285 - DNA, 783 bp, Adenovirus A18
  MISC_FEATURE (1)..(783): A18.orf00034 L3 protein VI
atggaagacatcaatttttcgtcgctggccccgcggcacggcacgcgtccgtacatgggtacctggaacgaaatcggcaccagtcagctgaacgggggcgccttcaattggaacagtatttggagcggtcttaaaaattttggctccacaattaaatcatatggcaccaaagcgtggaacagccaaaccggtcagatgctaagggataagctaaaagaccaaaacttccaacaaaaagtggtagatggtctggcttcgggaatcaatggagttgtagacatagccaatcaggctgtacaaaaacagattgcaaaccgcttagagccgcggcccgacgaagtaatggtggaggaaaagctaccccctttacaaacggtgcccgcatccgttccatccaaaggagaaaagcgcccacggccggatgcagaggaaaccctagtaacgcacacagtagagccgccgtcatatgaggaagcagtaaaacagggagcctcagtgttgcccaccacgtaccctatgacaaaaccgattttacccatggctaccagggtgtatggaaaaaatgaacatgcgcctatgactttggaaatcccgcctctgccggaacccactattgccgagccagtgctttcgacaccaccagttgcaacagtgacgcgtccagaagtacggccagtggctgtggccagcttacgaaacccgcgatccagtaactggcaaagcacgctgaacagcattgtggggttgggagtgaaatctctcaaacgccgtcgctgctattaa

SEQ ID NO: 286 - DNA, 219 bp, Artificial Sequence
  A18.orf00035 hypothetical protein
atggctcttacttgccgaatgcgcatacccataccaggatacagaggaagaccccgccggaggagagggctggccggtaacggtcgatttcggcggcgtagcatgcgcagacgcatgaagggcggggttctacccctcctaatccctcttattgctgcggccattggggccgttcccggaattgcttcagtggccttgcaggcttctcgaaaaaattaa

SEQ ID NO: 287 - DNA, 1050 bp, Adenovirus A18
  MISC_FEATURE (1)..(1050): A18.orf00038 L2 protein V
atgaccaaacgcaagtttaaagaagagctgctgcaggccattgcgcctgaaatatatggcccatcggaagctaacaataccaaacgtgaaatcaagcatgtaacaaaacgagaaaaaaaagaggaagaagctgcagcgctagcagacggcgtggagttcgttcgctcctttgcacccagacgtagggtacagtggaaggggcggcgcgtaaagcgcattttgcggccgggaaccacagtggttttttctcccggagagcgggcggttatgcgaccgctaaagcgcgagtacgacgaagtgtatgccgaccatgacattctggaacaagcggcgcagcagactggggagtttgcctatggaaaaaaagggcgctatggagacaaaattgccatccctttggacgatggcaatccaacacccagtttaaaggccgttactctacagcaagtattgccagtgcttgggccttcggaagaaaagcgtggaattaaaagggaagccgcggatgaattgcaacccaccatgcaactgatggtgcctaagaaacaaaaactagaggatgtactagagcacatagaagtggaccctagcatacagccagatgtcaaaatacgtcctataaaaaaagttgctcccggtttgggagttcaaacagtggacattcaaattcctgtgaaaaccgcgtttggtgaacctatggaaacccaaacttcgccaatggaaacccaaacttcgccaataaaaacagtagcggacgctagcatgcagacagatccttattacctacctaggctttccaaaaaacgttactacagaaaagcaagtgcgcttttaccaaactacgttctacatccttcaatcgtgcccacacctggatatcgcgggtccacttttaaacgccgagctgcgggctccagccgcaggcagggcccatcccgccgcagacgccgacgcaaagctaatttagttccagctgcagtgcgccgcgttgtacgaagggggcgcacactggttcttccgtccgtgcgttaccaccctagcattctctaa

SEQ ID NO: 288 - DNA, 570 bp, Adenovirus A18
  MISC_FEATURE (1)..(570): A18.orf00040 L2 protein VII
atgtcaattttgatttcgccaagtaataacacagggtggggcttaggttccactcgaatgtatggaggcgccaaaacaaggtccagccaacatccagtgcgcgtgcgcggtcattatcgagcgccttggggagcacatactcgaggacgcacagggcgcactactgtagacgatgttatcgattccgtagtggcagacgcgcgcaaataccgcagacccgctacctccgccgggtctaccgttgatgcagtcattgacgaggtggttgccaacgctcgagattatgctagacgccgcagacgtcttcgccaccgccgtcgtagaccaaccgctgctatgcgcgccgccagagctttggttcgacgcgccagacgcgttgggcgccgagctatgctgcgggcggcaagacgggctgccacacctactggtcgagcacgcaggcgtgccgcagctgcggcggcaagtgctattgcaaacttagctgctcctcggcgaggaaatgtatattgggtgcgcgactcagtaaccggaatgcgcgtaccagttcgtacgcgtccaccacatccttag

SEQ ID NO: 289 - DNA, 1524 bp, Adenovirus A18; identical to SEQ ID NO: 162
  MISC_FEATURE (1)..(1524): A18.orf00041 L2 penton protein

SEQ ID NO: 290 - DNA, 1737 bp, Adenovirus A18
  MISC_FEATURE (1)..(1737): A18.orf00043 L1 protein IIIa
atgcagcgaccggcgatcaccacggacgggacccctaacctggatcccgcggtcatggcagccatgcaaagccagccttctggggttacagcttcagatgactggacagcggccatggatcgtatcatggctttaacggcgcgcagtcctgaggcttttcgccaacagccccaagcaaatcgattttcggccattttagaagcagtagtgccttctcgcactaaccctacacatgaaaaagtgttaaccattgtgaatgccttgctggatagcaaagctatccgcaaagatgaagcgggtttaatatacaacgctttgttagagcgggtggcgcgctacaatagtactaacgttcaggcaaacttagatcggatgggaactgatgtcaaggaggcgttggcaaaaagagagcgctttcatcgcgacggtaatcttggctcgctggtggcgctaaatgcttttttgagtactttgccagccaacgttccgcgcggccaagaggattacacaaactttattagcgcactgcggctcatggtcaccgaggtaccgcaaagcgaagtgtaccagtccgggcccgattatttttttcaaacttccaggcagggtttgcaaactgttaatttaacgcaggcttttaaaaatttgcaaggcttgtggggagtccgtgctcctgtgggagaccgctcaaccgtgtccagtttgttaacgccaaactcacgcttattgctgttgctgattgccccctttaccaatagcggtagtttaagtcaagattcataccttggtcacctaattactttgtaccgcgaagccattggtcaagcgcaggtagatgaacagacatatcaagaaataactagtgttagccgagcgctgggtcaggaggacactggcagtttagaggcaacattaaactttctcctaaccaaccgtcgtcaacaagtgcctccgcagtatagtttaaatgcagaagaagagcgtatattacgctatgtacagcaatcggtaagcttgtatcttatgcgagagggcgccacgcccagcactgctttagatatgactgcgcgaaatatggagccgtctttctatgcttccaatcgagcattcattaatcgccttatggattaccttcaccgcgcagcggccatgaacggcgaatactttaccaatgctattttaaatccacactggcttccccctcctggcttttatactggcgagtttgatttacccgaaggaaatgatggctttttgtgggatgatgttacagacagtttgtttagtccagcagccattagtcaccatggcaaaaaggaagggggagatgaaggtccgctgattagttctcgatcaagttctccgtttcctagcttaacaagtattaacagtggacgggacaccaggccgcgactaactggggaaagcgattacttaaacgaccctatgctgcttccagtacgggacaaaaactttcctaacaatggtattgagaggctggtagacaaaatggcccgttggaaaacatacgcgcaggaacgccgagaatgggaggagaaacaaccaaagcctgttccgcctcccaggcaacgctggcagcgccgcaggaaaggagcatatgcttctgaaccagaaagcgacgattctgccgatgatagcagtgtgctggatttaggcggcacagggaacccatttgctcacttgcgtccccagggttacataggtcctctgtattaa

SEQ ID NO: 291 - DNA, 1125 bp, Adenovirus A18
  MISC_FEATURE (1)..(1125): A18.orf00045 L1 52 kDa protein
atgcatccagttctgcgacaaatgcgaccccagcccagggtaactacggcctcagcagcggtgccgctttcgggccctggcgaacaggaagagcctcagccttccacgttggagttagaagaaggagaaggcatagcccgattgggcgcccattctcctgagcgacacccacgggtgcagctaactcgagacagccgcgcggcgtttgtgcctcgtcaaaacatgtttcgagacaacagcggggaggaagctgaggaaatgagagactgcaggtttagggccggtcgcgagctgcgccgcggatttaatcgcgagcacctgctgcgcgaggaagactttgaaccaaatgagcgttcgggcattagtccagcacgggcccacgtcaccgcagccaatctagtaacagcgtatgaacaaactgttacagaggaacgtaattttcaaaagagttttaataatcatgtgcgcacactaatagcgcgagaagaagtggcaattggtttaatgcatctgtgggactttgtagaagcttatgtacataatccagcaagtaaaccccttactgcccaactgttcttgattgttcaacatagtagagataatgaaacttttagggacgcaatgctaaacatagctgaaccacagggtcgttggttacttgatttaattaacattctccaaagcattgtagtgcaggaacgcagtcttagtttagctgacaaggtggctgcggttaattactccatgttaagtcttggaaagttttacgcccgcaagatttataaaagtccgtatgttccgatcgacaaggaagtaaaaatagacagtttttatatgcgcatggctttaaaggtactaacattaagcgatgatcttggagtgtatcgcaatgacaaaatccacaaagcagtgagtgccagtcgccgcaaggagctgagcgacaaagaactaatgcatagcttgcaaagggcgctcacgggcgcgggaacagaggaggaggagtcgttttttgatatgggagcagacctccggtggcagcccagcgctcgtgctctggaggcggtcggagcaacaaccgctgatgtcaccgacgagtatgatgacgaagaccagtatgaggactga

SEQ ID NO: 292 - DNA, 1884 bp, Adenovirus A18
  MISC_FEATURE (1)..(1884): A18.orf00047 E2B terminal protein
atggctacaattcaacgctttttacccctgcgcaacatttggaacagagctcgcgagttcgctcgggcaaccaccaccgccgccggaatcacatggatgtctcgatacatatatgaataccaccgccttatgctggaagaccttgctcctggtgctccggccactttgcgttggccgttatattatgaacctccccctcatcttctggtaggctaccagtatctagtccgtgtctgcaatgactatgtgtttgactcccgtgcgtactcgcgcttacgctacacagaaactgttcagccaggttcgcaaactgttaactggtcggtaatgacaaactgcagctacactattaatacgggagcatatcacaggtttgtggacttggatgactttgccaccaccctagctcaaatccaacaggccgtacttgccgaacgcgtggtggccgatcttgccttgttgcaaccgttacaaggatatggcagcacacgtatggctgaccgcgaacagcgcgaagtagatgtggaaaggttgatgcatgactactacaaggaccttggacggtgtcaaagcgaagtttggggaatggctgaccgtctgcggatccaacaagccggtccaaaagacgcagtgcttcttacaaccattcgtcgtcttaagtcggcctactttaattacatcattagcagcattggagaccattctgattctgcaaatcaaacaaaactcagcctaccttgtgactgcgattggctagatgccttccttgaaaaattttctgatccggtggatatggacacactcagctccttgcgcggagttcctacgcaacaaatcataaaatgcatagtaagtgctgtgtcattgcccaacaccccttccaatgcttccatccctactttcagtgggacaggatttagaggtggagcatttgagttacgtccccgcgaaaacggtcaagctgtaaccgaaaccatgcgccgtcgccgcggcgaaattattgaaagatttgttgaccgattgccaatacgccgtcgacagagacgtgcgcccccacctccgccggaagaagaagaaataatggaaatacaagaggaggaggaggaggaggaggcgccatgggcatttgaacgggaagttcgcgaaacagtagccgagctcattcgtcttctagaacaggagttaacggtggcggctcgcaactcccagtttttcagctttgcggtggacttctacgaggccatggaccgtcttgaggccctaggagacatcaacgagctaacgctgcgccgctggattctttatttctttgtctcggaacatattgccaccaccttgaactacctgtttcaacgcttgcgcaactacggcgtgtttgcacgactagtagaattaaacctggcacaggtggtgatgcgcgcccgagatagcgatggaggagtggtatacagccgcgtctggaacgaaattggactaaacgcattctcacagcttatgagtcgcatatctaacgatcttgccgccaccattgaacgggcgggacatggcgacctccaggacgaagaaattgatcaattaatggcagaaattgcctaccaagataactcaggcgacgttcaggaaattcttagacaggctgcagtaaatgataccgaaattgattctgttgaactttctttcaggttcaagacaacagggccagtagtgtttacacaacgccgccaaattcaagacatcaatcgccgggtagttgcccgggccagtcaacttcgtgctcaacatcttcccctgccagagcgacaagccgacataccccttcctcagctttacgcaggacccgaaccacctcttcctccgggagcccgaccacgccgccgattttaa

SEQ ID NO: 293 - DNA, 3330 bp, Adenovirus A18
  MISC_FEATURE (1)..(3330): A18.orf00050 E2B DNA polymerase
gtgcttagtccccgggcccatggaatactacatgcaatcaattctgccaccggcactccccttgaaatcaagtatcacctgcaccttcaacctgctcttacccgcctgtgtgcagttaacttgaaagctgtccccgcagacttgcttttctctcttggcgataccatggacagcgccaagctgcacgccctggtttctcatctccgccccactcgtgctgagatctggacgtgcggctctcggggcaccgtcaccctttccgtcctcgctttccagaatccaggcggtagtgacaatgcacaagaagagaaagaggacgaacggcacccgccaaaacaaggggtcgattttcccctctgctttttggcgcgaggtcgccgagtacacctcattcagcagatacaacccgtgcaacgatgcgaacactgcggtcgcttttataaacatcagcatgaatgctctgtccgccgccgagatttctactttcaccacatcaacagccattcttccaattggtggcaggagatccaatttttcccgatcggctcgcatcctcgcactgagcgtctttttattacctatgatgtagaaacctatacctggatgggggcatttggaaagcagcttgtcccatttatgcttgtcatgaaattaactggggatgagtgtcttgtaaaccaggggttacaacttgctttggaacttggatgggaccagtgggaaaaagaccccactactttttattgcataaaccccgaaaaaactaaagtgggacaacagtttcgaacctacagaaaccgcttgcaaacatccttagccaatgatatttggtcacattttttacaaaaaaatccccacttgcctcattgggctcaacaggaacacggactaaccgctcttgaggaccttgcctacgaagaccttaaaaaagctccagcaattaagggtcagccaaggttcgtagaattatacattgtaggacacaacattaatggatttgatgaaattgttctggccgcacaggtcattaacagccgctcagacgttcctggaccctttaaaatttctagaaatttcatgccaagagctggcaaaatcttatttaatgatatcaccttcgctcttcctaatccacactataaaaaacgaatagacttttcactgtgggaacaaggaggttgtaatgaccaagactttaaatatcagtatttgaaagtaatggttagagacacatttgctcttactcatacatcattaagaaaagctgcgcaagcatatgccctttctgtagaaaaaggatgttgtccctacaaagctataaatgaattttatatgcttggttcttaccgtgcaaatgcagacggttttcccgtggaagagtattggaaggacaaggaagaatacctcctaaaccaacaactatggaaaacaaagaaagaaaaaaattacaaccttattaaggaaacattaaactattgtgccctggatgtacttgttacagccgcactggtagaaaaactgtacaactcctatgcccactttattactaactctgtgggccttcatgcggcacactttaatgtatttcagcgacctaccatttcctctaactctcatgcaatttttaggcaaattctatatcgctccgaaaaaccacagcggacaaaccttggacccaacatcctggcgccgtcacatgaattatatgactatgttcgcgccagcatccgcggcggtaggtgttatcctacctacataggagtattaaaacaacccatatatgtatatgatatttgtggcatgtatgcatcagcactaacacaccctatgccttggggtccaccccttaacccctatgaacgcgcattggccgcgcggcaatggcacatggcgctggaaaactatacttgtaagattgactattttgataaaaatctttgtccaggtatttttactgtagatgctgatcctccagatgaaaatcaactagatattctccctccatattgttcacgaaaaggcggtcgcctagtgtggaccaatgagcgcttgcggggggaagtagttactagtgtagacataatcacactgcacaaccgtggatggcgagtgcgcctccttcctgacgaacgcaccaccatctttcctacctggaagtgcctggcacgtgaatatgtgcaacttaatatcgctgcaaaggaacgcgcagataaggacaagaatcaaaccctacgctccatagccaaactgctttcaaatgccctgtatggatcttttgccaccaaacttgacaataaaaaaattgttttttctgatcaaatggaagaaggacttatgaaggaaattacagcaggtcgcttaaacatcaaatcctcatcatttatagaaactgacaccttgagtacagatgtaatgcctgcttttgagcgcgtgtacttaccccaacagctggcgctcgtaaacagcgatgcagaagaaagcgatgaagatcaaggacccgcccccttttatagccccccaccagaaacctcaggtcatgtgacttacacctacaagccaatcacatttctggatgctgaagaaggggatatgtgcttacacaccctagaaagctctaatcccttaataagtaacgaccggtatccttcccatgttgcttcctttgtactcgcttggactagggcttttgtgtcagagtggtcagaattcctgtacgaagaagaccgcggaatacccctgaaggacagacctcttaaatccgtgtacggagacacagacagcctttttgtgacagaggaaggacgccgccttatggagtcacaaggtaggaaacgcatcaaaaagcacggtggaaaacttgtttttgatccatcttgtcctgagctgacctggtcagttgaatgtgaaactgtttgtaacttctgcggctctgatgcatactctccagaatctgtgtttttggctccaaaactatacgcccttaaatgccttcagtgtcccagctgcaaacgcatctcaaaaggaaaaatacgagctaaaggacatgccgcagatgctctgtcttatgatctcatgttaaaatgctaccttgccgaagcacagggagaagacgcccagttcagtaccagccgtctgagtttgaagcgcacattggccagcgcacaaccaggagcgcatccatttacagtgacggaaacaactctcaagcgcaccttgcgaccctggaaagacaaaactctcgcccacctagacgctcatcgtctcatcccttacagcaacagccaacccaacccccgcaacgaggaaatttgctggatcgagatgccatag

SEQ ID NO: 294 - DNA, 1050 bp, Adenovirus A18
  MISC_FEATURE (1)..(1050): A18.orf00052 IVa2 protein
atgcctatggctgatggtttaaaacctcttaaaaattttaaatctttacaggagttgctatcgctgggcggagagcgtcttttgggggaactagctaagcaaaacacatgcgtcagacaaatgatgaatgaggtggccccactcctccgagaagacggcagctgcacctcgttaaactatcatttacaaccagttattggggttatttacggacctactggttgcggtaaatcgcagctattgcgtaacttgctttcggcccagctggttacacctgctccagaaactgttttttttattgctccccaggttgatatgattcccccgtctgaaattaaagcttgggaaatgcaaatttgtgaagggaattatgccccaggaccccaaggaactttaataccccaatctggaacattgcgccctaaatttgttaagctgtcctacgatgacttaactctggaccacaactatgatgtttctgatccaaaaaacatttttgctcaggcggccgctgtagggccaattgccataataatggacgagtgcatggaaaatttgggcagccacaaagccgtttctaagttcttccatgccttcccttccaaactacatgataaatttcctaaatgtaccggatacacagttttagtggttttacataacatgaatcccagaagagatttggccggtaacattgctaatcttaaaatacaatcaaaaatgcacatcatgtctccacgtatgcaccccacccagcttaatcgctttataaatacctacactaaagggcttccgctagcaattagcttattacttaaggacatatttcaccaccatgcccagcgttcttgctatgattggattatttataacaccaccccagaacatgaagccctacagtggtgctaccttcaccctaaagacggtcttatgccaatgtatcttaatatacaatcgcatctctatagcatactagaacacattcatcgtgttattagtgacagggaaagatggaccagagcctatcatgtaagaaaaaacaaacactaa

SEQ ID NO: 295 - DNA, 438 bp, Adenovirus A18
  MISC_FEATURE (1)..(438): A18.orf00053 IX protein
atgaatggaactacgcaagacaacgctgcgctttttgatggaggggttttcagtccttatttgacttccaggttgccgtactgggccggagtgcgtcagaatgtgatgggatctaccttggacggccgacctgtggcacctgctaattcgtcaaccttaacatatgcaactgtgggaccttcgcctttggacactgctaccgccgctgcggcctctgcagccgcttccaccgctcgcagtatggcagccgatttcaacttctacagtcacttagcttcaaacgctgtgacgcgcactgcggttcgggaagacattctaactatgatgctggctaagcttgagactctaaccgctcagttagaagatctatcgcagaaggttgaagagcttgctgttgcctctacccgtacccccccagcccaacctgtagcccaataa

SEQ ID NO: 296 - DNA, 1425 bp, Adenovirus A18
  MISC_FEATURE (1)..(1425): A18.orf00054 E1B 55 kDa protein
atggagccagacgtcccagctgagttgggattacatgctggattacatggcaatgcagctgtggagggcatggctcacgaggagggtttgcatttactcgctggcgcggcctttgaccatgccgcgactgccaacgttgcaggaggaggagctggagcagcgggaccctgcggcggagaagtgaacatggaacaacaggtgcaagaaggccatgcacttgaccctgaggaagggcccagctgtgcagctgttaacattaagcgggaacgggaaacggttcttagtaggctagctgttaatataatgtctcgcccgcgcttagaaactgtgtattggcaggaactgcaaaatgagtttcagcaaggagatatgcatttacagtacaagtatggttttgagcaattaaaaactcactggttagagccttgggaagatattgagagtgctattaaaacttttgcaaagttagctttacgccctgatcgcagctataaaattagtaaaacaataactattgcttcatatgcttacattattggtaatggtgcaataattgaggtggatacaagtgacagggttgctttcagatgtcgcatgcagggcatgggtcctggggtggtggggttgggcggtattacctttattaatgttagatttgctggagacaaatttaaaggtactttgtttgaagccaacaccagccttgttttgcatggtgtttattttcttaattttagtaatacttgtgtggagtcttggattaaggtttccgcaaggggctgtacgttttatggttgtaggaggggtttagtaggcagaccaaaaagtaaaatgtctgtaaaaaaatgcttgtttgagaaatgcgtgctagccttaattgtggagggggatgcgcatattagacataatgcagcttcagaaaatacatgttttgttctagtgaagggaatggctgttttaaggcacaatatggtttgtggagtgtccgatcaatctgcgcgccgttatgttacttgcgctgatggaaattgtcatgccttaaaaactattcatgttgtgagccatgttaaacatcgctggcctgtgtgtgatcataatatgtttatgcgttgttccatgcatttaggcttaaggcgtggcatgtttgtgccttttcaatgtaaccttagtcatacaaatgtattgcttgaacctgaggtgttttctagaataagtttaaatggggtgtttgacctgtctgtggaattgtataaggttataagatatgatgatactcgtcaccgttgtcgacagtgtgagtgtggcagcagtcatctggaactccgccctgttttattgaatgtgacggaggagctgaggagtgaccaccttaccttatcttgcctgcgaactgactacgaatccagtgatgaagacggcaactaa

SEQ ID NO: 297 - DNA, 141 bp, Adenovirus A18
  MISC_FEATURE (1)..(141): A18.orf00056 E1A protein
atgttaaccacgcccaatgaaaccaataaaacacttaacagaaaaacaattttattgtacgtcactaaagggccaaaaccacccttcctttattgcacaggtgtgcaaagtccactaatcatatctagggcgtttcactga

SEQ ID NO: 298 - DNA, 135 bp, Adenovirus A18
  MISC_FEATURE (1)..(135): A18.orf00057 E1A protein
gtgttaaaacctgttccgcaacggattactggcaggcgtacccatgttgaaagcattttggatttgattcaagaggaagaaagtgaacaaacagagcctgttgatttgtcagtgaaacgccctagatatgattag

SEQ ID NO: 299 - DNA, 597 bp, Adenovirus A18
  MISC_FEATURE (1)..(597): A18.orf00059 E1A protein
atgaggacagaaattactcctttggttctgtcgtgtgaagaggctgatgacatattggaggacttggtgaacaatttttttaccgaggtacccgatgatggggatgatttttatactccttctctttatgaactgtatgatattgatgtggacgttactgacaacgattgtgatgagcaggctgtaagtgcattttttcctgagtcgctacttttagccaccagtgaggggctgttgttgacagaacctccagttatttctccagtagccgctagtgatgggctgttgttgacagaccctccgattctttctccggtatgtgaacccgttgggggtgaatatatgccccgactgcagcctgaagatgagcaggatgtacgcggaatggcattggtgtccgcatctgctatggctgctgttacgcatcatgagaagtttgagttagataatccagaactgcctgggcatgattgtaagtcctgtgaatatcatcggaatagtactggaaataatgacttaatgtgttctctgtgttatctgcgagcatacggcatgtttatttacagtaagtgcattttaaaacggggggtgggttag

SEQ ID NO: 300 - DNA, 159 bp, Artificial Sequence
  A18.orf00060 hypothetical protein
atggcgttaaacacgtcacatccggcgcgcccggctcccacgccgcgcccaacttcctcatccgcccaaacttacaaacacgcccaggccacacctccacccaatcaaagtacatcgccacacccacttcattttaatattggctctagtccagtataa

SEQ ID NO: 301 - DNA, 120 bp, Artificial Sequence; identical to SEQ ID NO: 228
  A18.orf00061 hypothetical protein

SEQ ID NO: 302 - DNA, 384 bp, Adenovirus A31
  MISC_FEATURE (1)..(384): A31.orf00003 E4 ORF1 protein
atggctgttttcgaggctgtatatgtgtattttaagggacccggggctatgttacctgaacaagaaggctattctaatgcttatgtgttattttctcctgcgaattttgttatacctccacacggagttgtgcttctatatttaaacatagcagttgatcttcctcctggatatgtgggaactttgttttccttgagcggcatgaacgccagaggggtttttgttggcgctgaaacgctttatccaggctcaagaatggagcttagtgttttgttgtttaatcactcggatgtgttttgcgatgtccgcgcaaagcagccagttgcgcgcttggttttaaatagagttatttttccacctattcgccaggcaactttactttaa

SEQ ID NO: 303 - DNA, 363 bp, Adenovirus A31
  MISC_FEATURE (1)..(363): A31.orf00004 E4 ORF2 protein
atgtttccggagtctttattgaactatttgcatggcttaaattttgaggtggtggcgtttcttaaagacgtgctacctgagttttggctgttggtaatgcattatttaactcctcctatgcgcgatgtctacgttggcgccacgcttactaatatgggcccatttgtgcaagttgtatgctctgtggggactccggaacttgtacctggaggtgaactttctttgctgctggcttctgatttgcatgattttatacaactggctttaagatgtcagctgcgagagcaaggtgtggagcctaatgtaaatctactgaatttactgcaggtgtttgaagatccagacttttttcagcaaatatga

SEQ ID NO: 304 - DNA, 351 bp, Adenovirus A31
  MISC_FEATURE (1)..(351): A31.orf00005 E4 ORF3 protein
atgaagtactgcctgcggatggcggtggagggcgcccttacagagctttttaatattcatggcttaaacctgcaaaatcagtgtgttcaaataatacaacagtggaagaatgaaaattatttgggaatggttcagtcaggcagtctgatgatagaagagtttcatgataacgcatttgctttacttttgtttgtggaaattagagccgtggctcttttagatgctgttgttgaacatttggaaaaccgcttacaatttgatctggctgtgatttttcaccagcacagcggaggtgatcgctgccacctgcgagatttacgcattcaaatacttgctgaccgtcttgattag

SEQ ID NO: 305 - DNA, 129 bp, Adenovirus A31
  MISC_FEATURE (1)..(129): A31.orf00006 E4 ORF4 protein
atgtactcagcttcaggtgtgattttcaaattatgctctttaacaaagcgaatagtatccacacaggtcgcatgggccaaaccaagccatccaatacaggcagctgtatcccgacatatgggaggttga

SEQ ID NO: 306 - DNA, 870 bp, Adenovirus A31
  MISC_FEATURE (1)..(870): A31.orf00009 E4 control protein 34 kDa
atgcagcgcgacagacggtatggttgcagactggcgccgtacagcaagtaccatctaccaccttgtgaacagcagtcaaaagctactctgtcagagaattctgcatggcctgagtgtaatagtctgactttgcataatgtaagtgaggtaagaggtattccttcatgtgtagggtttactgtattgcaagaatggccaataccatgggatatgattttaactaattatgagatgtttattttaaaaaaatacatgagtgtgtgtttgtgttgtgccaccatagatgttgaaattactcaattgttacatggttatgagcggtggctaatacattgtcattgccagcgtccgggttcattacagtgtatgtcagctgggatgcttttaggacgctggttcaaaatggctgtatatggaacattaattaacaaaagatgtttttggtatcgggaggttgttaaccattttatgccaaaagaaataatgtatgtgggaagcacctttgttagaggtcgccatttgatttatgttaaaattatgtatgatggccatgcttggttagcgctagaaaagattagttttggatggagtacctttaattatggaattttaaataacatgttagtgttgtgctgtgactattgcaaagacttaagtgaaatacgcatgcgctgttgcgctcgtcgtaccagactattaatgttaaaagttgttaaagtaattgctgagaacactgttcgcccactaaaacatagttggtgcgaaggccatcgtcagcgactgctaaagggtcttattatgcatcatcaagcaattttatttggagattacaatcatcgagaaaacccatgggcggctgatggacactga

SEQ ID NO: 307 - DNA, 216 bp, Adenovirus A31
  MISC_FEATURE (1)..(216): A31.orf00010 E4 ORF6/7 protein
atggaatgcagtttaagagactgtgcgggcgaaggatttgtttgtatcaccgactgtcgttttgcccagaaggaaaccgtgtggacgttaacaccaaaaaaccaaagtagaaacattcaagcgcagctgttttccgcaacaaagtgggagagggaggtatacaaggtgaaatgggaagaaggcagtataactactcgtattgtaaaaaagaattaa

SEQ ID NO: 308 - DNA, 1668 bp, Adenovirus A31; identical to SEQ ID NO: 131
  MISC_FEATURE (1)..(1668): A31.orf00012 L5 fiber

SEQ ID NO: 309 - DNA, 159 bp, Adenovirus A31
  MISC_FEATURE (1)..(159): A31.orf00013 U protein
atgaagatggtgggtaggaattgggaagaaaattctgacattccatttaaaatttggagaaaatttgctgtttgcaagtctattggctttgatagttgggaagaaggaaattttgtaagagtacatggagaccacaatgtatttttaaatttcaggtaa

SEQ ID NO: 310 - DNA, 387 bp, Adenovirus A31
  MISC_FEATURE (1)..(387): A31.orf00014 E3 control protein 14.7 kDa
atgattgaacccgacctacaaatggatggaacaatgaccgaacagaggttgcttgctgatcgcgctaggcgtcgccaacaggatcaaaaaaataaagagttacttgatttacaaaccgttcatcagtgtaaaaaaggacttttttgcctggtaaaacaagccaccctccgctacgagaatttaccaggcaaagagcatcaactttgctacacgctgcctactcagcgacaaagcttcaccgcagtcgtgggttcggtgcctattaaagtgtcccaacaagcaggacagcaagaaggctccatttgctgcctatgtaccagccctgaatgtttgtacactttaataaaaacactgtgcggcataagaaagcttttaccaatgaattaa

SEQ ID NO: 311 - DNA, 294 bp, Adenovirus A31
  MISC_FEATURE (1)..(294): A31.orf00015 E3 RID-beta
atgttggccacttcttgtaagcttcacgtgccatggactttcttagactgctacaccaaagagacagattacataggctgggtgtatgggattatgtctgccttagtttttgtatcctctgtagtttccttaaaactttatacgcttattaattttagttggaatcaatacactgatgatctccctgagtacccacaccaccaggatgatttacccctaaacattgtacttccacagcccccacgtcctccttcggttgttagctattttaagttcgccggtgaagatgattga

SEQ ID NO: 312 - DNA, 276 bp, Adenovirus A31
  MISC_FEATURE (1)..(276): A31.orf00017 E3 RID-alpha
atggtgacggttcttcttatattcttatgcctgccaatcattttttcttcttcaacttttgcagcagtgagtcacattgatcctgattgtatagcaccctttgcggtgtatttgatttttacatttgtgaccgccacgtgcgtctgcagtcttataactttacttcttacctcgcttcaattttttgattactactacgtgcgatacgtttaccgcagacatcaccctcgttatcaaaacccccacattgcagctcttctccatctacaaccatga

SEQ ID NO: 313 - DNA, 753 bp, Adenovirus A31
  MISC_FEATURE (1)..(753): A31.orf00018 E3 CR1-beta
atgcttagtattttagtctttgtttttttacctttcctcctacatgctcaaacatctgagaaaccattgaaagtatttgtggaagttggccataatgtaaccctcccccatctcatgcctgattcacacgaaacaggccatgtgacttggctagtagaaacagcagattacggtgtagcttctccaaacaactttatttttagtggacaaaaactatgccagtttacttccagaactatggtgtggccttatgccaatctagattttaactgcgctaattatgacctccatttgtttcggcttaaggtagaaaattcagccatttacaatgttaaaaataccatcaatgcatctgaaatgaatatctactatcaattaacagtaattgacattcttccacccaaatgcatcattacttcaaagtacctcacaaataattattgtcacattaccattaactgcaccaactcggtgtatccaaacaaagttcagtttaataatgtcactcgattctactatggatacgccaagggaggcccaaacctacctaattatttcaccactaattttaatgtatcaggtattactaaaagctttaaccacagttacccttttaatgagctgtgtgatgaccccgtgttccaacctcagaataatttaaaaaacacggtgattttcttagtaataattgcatttagcgttctcattattattgcagccctcacttacctgtgctgtcacaaacagacttaa

SEQ ID NO: 314 - DNA, 789 bp, Adenovirus A31
  MISC_FEATURE (1)..(789): A31.orf00019 E3 CR1-alpha
atgaagatttttgctgtcatttgtgtgctgaatttaatcatttgtagtggcggtttaccgcctgaagaagaacctaactgtcatccgcctcttagtaacattaaaattaacctttcaatctctgacattactcttcgctgcaattttttctccacccatctcacctggagttttaacggaaaacccatcgccgaggtaaaattaaagtttcagctacacaaagaaaacatcactttatttgcacctattcacctgggatactaccgctgcgcagctccaccctgtcagcaagccttttttgtttctccgattattaacagaaaacctgctacaacaacacctgtcactcggcaaaacatccagacgacttctcctactaaaggtatagaggaaattgtgtacttttcaaactttacaaaccacttacttttaaactgttcctgctctaactccttaatctcatggtttgctaataacactttgtgtaaagctttttaccaacaaaaacttttgtattctgccaatttaacactgtgtaaccaaaccacttcttcccaccttactctactaccaccttttgtcgctggtcgttatttttgcttaggagctgccggtactagcccctgtcaacagcactggagattaacttatcgcccaacgccagtaacgccttctgtaataacagaggcatttacctctaataccttgcttctatatagtggtcttgtggctcttactctatttctaatttctaacttgtttctagtgcagcatttgtatttgtactaa

SEQ ID NO: 315 - DNA, 318 bp, Adenovirus A31
  MISC_FEATURE (1)..(318): A31.orf00020 E3 12.5 kDa immune modulating protein
atgtctaatggagcggccgacagagcgcggctgcgacatttagaccactgtcgccaacctcgctgctttgctcgagacatctgcgagtttacttactttgagctgccagaggaacaccctcagggaccagctcacggcgtaaggataacagttgaaaaaggaattgatacacacctcattaaattttttaccaaacgcccgctattggttgaaaaggatcaagggaatactgtactaactctatattgcatttgtcctgcccccggattacatgaagatttttgctgtcatttgtgtgctgaatttaatcatttgtag

SEQ ID NO: 316 - DNA, 702 bp, Adenovirus A31
  MISC_FEATURE (1)..(702): A31.orf00022 L4 VIII capsid protein
atgagtaaagatattcccacgccttacatgtggagttttcaacctcaaatggggctagcggcgggtgcggctcaagactattctactaaaatgaattggttaagcgccggcccacatatgatttcccaagtaaatggaattcgcgcccggcgaaaccaaatgctactacaacaagccgctctcaccgctacaccgcgtaaccagcttaacccaccctcttggccctctgccctattgtaccaggaaagtccccctccaacaacggtacttttgcctcgcgacgcccaggccgaagtccgcatgactaatgctggcgcacaactcgcgggcggcgcacgtcatagtttcaggtataaaggtcgccctgggccgtactcatcttctgctataaaaacaatacgcattagaggaaaaggtattcagctgaacgacgaggcaacatcgccactgggactcaggcccgacggagtgtttcagctggcaggctccggccgctcgtccttcactactcgtcaagcctacctaacacttcagagttcgtcaacagctccaagatccggcgggattggaactcttcaatttgtggaggaatttactccatctgtttactttaatcccttttcgggctcgcctggacactatcctgacgccttcatacccaactttgacgccgtgagcgaatctgtggatggttatgattaa

SEQ ID NO: 317 - DNA, 333 bp, Adenovirus A31
  MISC_FEATURE (1)..(333): A31.orf00024 L4 splicing factor
atgttctccattactaccgtcatctctacagccccttcgaagagatccacaaagaatcgacgtcttacggaccagcggcccactagaaaaaccggcagcagcaacaaggaaagtccagaggcgcgcgagttaagaaaacgcatttttcccactctatatgctatttttcagcagagccgaggccaagaacacgaactgaaaataaaaaacagatccctccgttcacttacccgcagctgtctctacctcaaaagcgaagaccagttgcaacgcaccttgcaggacgctgaagctctgttcaataaatactgctccctctcgcttaaagagtaa

SEQ ID NO: 318 - DNA, 2328 bp, Adenovirus A31
  MISC_FEATURE (1)..(2328): A31.orf00027 L4 hexon-assembly protein
atggatccgcagtcaaaggaaaacttaaccgcccccaccgatactgctgttgctgccatggaaaagaacaaatgtctactcataccccaagatgcaccgcttgcgcaggactcgggctacgtgactccccccgaggaattggaaggctctcttctaatccaagagcaaccaaataaggaacaggcagaaagcaatgagcaagacgctgagctccatgactacctaggcaagggagatgtcttgcttaaacatttacagcgacaaagcattatcgttcgcgacgccgtagctgaccgctctttattgccagtctcaatcgcggaactttcttgcgcatacgaacgcaacctgttttctccccgtgtgccgcccaaacgacaagccaatggtacctgcgaaccaaatcctcggctgaacttttacccggtttttgcgataccagaagctctggcaacataccacattttttttaaaaatcatagaatacctctgtcttgccgagccaaccgcagtcgcgcagataagctccttacccttagcggtggtgcttccatacctggtatagtgtccttggaagaggtgcctcggattttcgaaggcttggatcgcgatgaaaagcgagcagcaaacgccctacaagcagaaaacaagcaaaatcaaagtgcgctcatagaactagaaggtgacaatgcccgtttggccattttaaaacgcaatgttgaagtaactcacttcgcatacccggcagtgaatcttccgccaaaggttatgagcgcagtaatgaatcaactactaattaagcgcgctcagcccattgacaaagatgcaaacttgcaagattcagaggcatcagatgatggaaaaccagttgtaagcgacgagcagctaattaagtggctgggaacagacaaccccgccaaactacagcagcggcgtaaacaaatgatggcggcagtacttgtaacggtggaactggagtgcatgcaccgttttttttccaacgttagcacgttgcgcaaaattgaagaatgtctccactacacctttcggcatggttatgtgcgccaagcctgcaaaatttccaatgtggagctaagcaaccttatctcatacatgggtattttgcacgaaaacagattgggacaaaatgtgctacattcaacgctacgcgacgaagcgcgcagagattacgtgcgggactgtgtttatctttttttgctacatacttggcaaaccggaatgggggtgtggcaacaatgcttggaagaaactaacctcagagaactcaacaaactgcttgacagagcgttgaaatcattatggacaggttttgacgagagaacggtagcggcagatttggcaaacattatttttccagaaaggctcatgataaccttgcaaaatggtctgcctgactttatgagtcaaagtatgctgcataattaccgttcttttatattggagcgatctggcttgttacctagcatgtgctgtgcgcttccttcagattttgtgcccattcattttagagaatgtccccctcctctgtggagtcactgctacttgttcaaacttgccaattacttagcttaccactcagaccttatgacggattccagcggagaaggattaatggagtgtcactgtcgctgcaatttatgcactcctcaccgttctctggtgtgtaataccgaactgcttagtgaaagccaggttattggtacgtttgaaatgcaaggaccgcactctgatagcaatctcaccacaaacctgaggctgacacctggcctttggacttccgcttacctgcgcaaatttgaacccctagattaccacgcacacgttattaatttttatgaagatcagttaaagccccctaaagcgccactaacggcctgcgtcattacgcagggaaaaattttagcccaattacaagccattaaacaagcgcgcgaagaattcttactcacaaaaggacgcggagtgtaccttgacccccagaccggcgaggaactgaaccttccatcacctctgtgtgctactgcatcctctccccattcgcagcatgtccccgaaaaccgcaaaacaagctattgcgcagcaacgctcaaagaagcagctacaacagcaggaaatctgggaggaagattcttgggacagtcaggcacaggaggaccaggacttggaagaatgggaggaggaaagcctagacgaggatccagaggaggacggttccaaggacggagcgaccgccgcaaaaccgtcgctttcaaccgaaccctctccagtgaaacacactgtcaacaaatctcagaaagcgagccgtag

SEQ ID NO: 319 - DNA, 1458 bp, Adenovirus A31
  MISC_FEATURE (1)..(1458): A31.orf00029 E2A ssDNA-binding protein
atggccagcaatcagcactcacagagggagcgcaccccagaccgcaacactcagccgccacctccaaaaatgggtcggtactttttggaatcagaaagcgaagaagacctggaggctgtgcctttgcctccaaagaaaaaagccaggaggtccatggctaccatccctctatctccggagagcgaaaaagaagaagaaaccgagccgccaaatgcagtcttaggagtcatgggtttcagcatgcctcctgttcgcattatgcatcatgcagacggttctcagtcttttcaaaaaatggaagaaaggcaggtgcgcattttaaaggccgctgctcaaaacatggaaggcaaagaacaaaaaggcgtagtaatagttcgcaaccccacgagcgagcctctgatatcagcttgggaaaaaggcatggaggcaatggctatgctgatggagaagtaccatgtggatcacgacgagcgtgccagctttaggtttttgccagatcagggagcggtgtacaaaaaaatttgtacaacatggctaaatgaggaaaaacgcgggttgcagctaactttttcatcccagaaaacctttcaggagcttatgggacgcttcctacaaggatatatgcaagcctatgccggtgttcaacaaaatgcctgggagccaactggttgctgtgtatgggagcaccagtgcactgaacgcgaaggggagcttagatgcctgcacggcatggaaatggtgcgcaaagagcacttgatagagatggatgtaaccagcgagagcgggcagcgagctctgaaagaaaatccatctaaagccaaggtagtgcaaaaccgctgggggcgtaatgtagttcaaattaaaaatgatgacgcccgctgctgttttaatgatgttggctgcgggaataattctttttccggaaagtcatgcggtttgttttattcagaaggaacgaaggctcaaatggcttttaggcaaattgaggcttttatgttggccgactaccctcacatgcgacaggggcagaagcggttcctgatgccagttcgttgtgaatgtttaaacaagcaagatggcctgccgcgcatggggcgtcagctgtgtaaaattactccatttaacctcagcaatgttgaaaacatcgacgttaacgaagtcagcgaccctggagccctggccagtattaagtatccatgtttgctggtttttcagtgcgcaaatccagtttatcgcaatgcccgcggtaacgccggtcctaattgcgacttcaagatatcagctcctgatgtcatgggtgcattgcagcttgtgcgacagctatggggagaaaattttgaaggcccgcttcctaggcttgttattccagagttcaagtggcatccacgtttgcagtatagaaacatagccctgcccaccaaccatggcgattctcgagaggaaccgtttgatttttaa

SEQ ID NO: 320 - DNA, 612 bp, Adenovirus A31
  MISC_FEATURE (1)..(612): A31.orf00031 L3 protease
atgggttcaagcgaacaggagctgacggcgattgttcgagatctaggctgtggaccctattttttgggtacctttgacaaacgttttcccggttttgtgtctcgcgaccgcttatcatgcgctattgttaacactgccggtcgcgaaactgggggcgtacactggctggcctttgcatggaatcccaaatcgcacacttgctatttattcgatccatttggattctctgatcagcggttaaaacaaatctatcagtttgagtacgaaagtctgttgcgccgtagtgcgctagcggccactaacgaccgatgcgtcaccctagaaaagtcaacacaaactgtacaaggaccgttttctgcagcgtgcggcctgttttgttgtatgttcttacatgcttttactcactggcctgaccatccaatggataaaaatcccactatgaatctactaactggggttccaaatagtatgttacaaagtccgcaggtggaggacacactgcggaggaatcagcaagaactatatattttcttaaacaaattgtcaccttactttcgcaacaaccgccagcgcatagaaaaagccacctctttcactaaaatgaaaaattga

SEQ ID NO: 321 - DNA, 2754 bp, Adenovirus A31; identical to SEQ ID NO: 191
  MISC_FEATURE (1)..(2754): A31.orf00032 L3 hexon

SEQ ID NO: 322 - DNA, 783 bp, Adenovirus A31
  MISC_FEATURE (1)..(783): A31.orf00033 L3 VI capsid protein
atggaagacatcaatttttcgtcgctggccccgcgacacggcacgcggccgtatatgggcacctggaacgagatcggcaccagccagctgaacgggggcgccttcaattggaacagtatctggagcggtcttaaaaattttggttccacaattaagacatatggctccaaggcgtggaacagccaaaccggccagatgctaagggacaagttaaaagaccagaacttccaacaaaaagtggtagacggtctggcttctggaatcaatggagttgtagacatagctaatcaagctgtgcagaaacagattgccaaccgtttagagccgcgacccgacgaagtaatggtagaggaaaagttaccgcctctggaaacggtgcccggatcagttccgtccaaaggagaaaagcggccgcggccagatgcagaggaaactctagtcacgcacaccatagagcccccttcttatgaggaagcagttaaacaaggagcagctttggcacctactacttatcccatgaccaagcctattctacccatggctaccagggtgtatgggaaaaatgaaaatgcgcctatgactctcgagattcctcccttgccagaacctactgttgcggaacctgtggttactgctccgattgtttcaactgtatcgcgtccagaagtgcggcctgttgccgtagcaagctcacgaaacccgcgatccactaattggcaaagcaccctaaacagcattgtgggactgggagtaaagtctttaaaacgcagacgctgctattaa

SEQ ID NO: 323 - DNA, 1035 bp, Adenovirus A31
  MISC_FEATURE (1)..(1035): A31.orf00037 L2 V core protein
atgaccaaacgcaagttcaaagaagagctgctgcaggccgtcgcgcctgaaatatacggcccagcggattacattaccaagcgcgaaatcaagcatgttaaaaaactggaccaaaaaaaagaggaagaaatggccgcagcgctagcggacgaagtcgacttcgtgcgctcctttgcgcccagacgtagaatacagtggaaagggcggtcagtaaagcgagttttgcgacccggcactacaatagttttttctcctggggagcgaacggctatgcgccccctcaagcgcgaatacgatgaagtgtatgccgatgatgacattttggaacaggctgcccaacaggctggtgaattcgcctatggaaaaagaagccgttacgacgacaaaattgctattcctttggacgagggaaatcccacacccagtttaaaggctgtcactttacagcaagtattacctgtgctcgcgacctcagaagaaaagcgaggcataaaaagggaagctatgaatgacttacagcccacaatgcaacttatggtgcccaagcggcaaaagttagaggacgtactagagtacatgaaggtggatcccaacattcagccggacgtaaaaatacgtcccataaaaaaagttgccccaggattaggagtccaaacagtggacatccaaattcccgtacaagctgcgcaaagtaaaactatggaaacccagacttcgccaataaaaacagcagtggacagcggcatgcaaaccgagccttggtacccgccaacttttacaagaaaaaaacgccactacaaacaaacaaacgcgctcttgccagaatacgtgctacatccttccattgtgcccacgccggggtatcgcgggtcaactttccagcgcagagccctagtttatagtcgcagaagaactccgtcgcgacgcagacgtcgacgcagagccaatttagctccagcatcagtacgccgcgttgtacgaaaagggcgcacactgacgcttccatctgtgcgttaccaccctagcatactctaa

SEQ ID NO: 324 - DNA, 564 bp, Adenovirus A31
  MISC_FEATURE (1)..(564): A31.orf00038 L2 VII core protein
atgtccatcttggtttcgccaagtaacaacacgggctggggattgggagctggccgcatgtacggaggagctaaaaccaggtccagccaacatccagttcgcgtccgcggacactatcgagcgccatggggagcacatacccgcggacgcactggtcgcaccactgtggacgatgttatcgactcggtcgtagccgatgctcgaaaataccgtccaccagccaatacagcagggtctaccgttgatgcggtcattgatgaggtagtggcaaacgcacgagcttatgccagacgtcgcagaaggccgcgtcggcgccgacctactgctgctgtgcgtgcggctagagcgttagtgcgacgcgctagacgcgtcggacgtcgagctatgctgcgagcagccaggcaagctgtaacgcctgccggtagagcgcggagacaggccgcagctgcggccgcaacagctattgccaacctagccgctcccagacgaggaaatgtgtactgggtgcgcgacgcggtaactgggactcgagtcccggttcgtacgcgtccacctcacccttag

SEQ ID NO: 325 - DNA, 1518 bp, Adenovirus A31; identical to SEQ ID NO: 163
  MISC_FEATURE (1)..(1518): A31.orf00039 L2 penton

SEQ ID NO: 326 - DNA, 1737 bp, Adenovirus A31
  MISC_FEATURE (1)..(1737): A31.orf00040 L1 IIIa capsid protein
atgcagcgaccggctatcatcacggacggggcccgtaacctggatcccgcggtctcggcggccatgcaaagtcagccttctggagttacggcttcagatgactggacagcggccatggatcgtattatggctttaacggcgcgcagtcctgaggcttttcgccagcagccgcaagctaatcgattttctgccattttggaagcagtagtgccgtctcgaactaatcccacccatgagaaagtgctaaccatagtgaacgctctgttggacagcaaagctatccgtaaagatgaggctggtcttatatacaatgctcttctggagcgcgtggcgcgctacaacagtaccaacgtacaggctaacttggaccggatgggtatggatgtaaaggaagcacttgcgcaacgagagcgatttcatcgcgacggcaatcttggctccctggttgcgctaaatgcctttttaagctctcagccggctaatgttccgcgcggtcaagaagattacacaaactttataagcgctttgcgcctgatggttactgaagttccacaaagcgaagtgtatcagtctggtcctgattatttctttcaaacttccaggcaggggttgcaaaccgtaaatttaagccaagcttttaagaatttgcaaggcctgtggggggtacgcgctcctgtgggtgatcgctcaactgtctccagtctgttaacgccaaattctcgattattattgttgttaattgccccttttaccaacagcgatagtttaagtagggattcgtatctaggtcacttaattactttgtatcgcgaagccattggtcaagcgcaggtagatgagcaaacgtatcaagaaataaccagcgtgagtcgcgctctgggacaggaggatacaggcagtttggaagccacgcttaactttttactaacaaaccgccgtcagcaagtgcctccgcaatacagtttgaatgcagaagaagagcgcatactgcgctacattcagcaatcagtgagcttgtatttaatgcgcgaaggcgcaacgcccagtgccgctttagatatgactgcgcgcaacatggagccgtcattctactcttccaatagagcatttattaatcgtttaatggattaccttcaccgagccgcggccatgaacggagaatactttaccaacgcgattttaaatccgcattggttaccacctcctggtttttatactggagaatttgatttaccggagggaaacgatggctttttgtgggatgatgttacagacagtctgttcagcccggcagccattggtcaccatggtaaaaaggagggagcagatgaaggtccgttactaagctctcgggcaagttcgccgtttcccagcctaagcagtattaacagcggtcgtacaacaagaccgaaactatcaggggaaagcgagtatttaaatgatcccctgttacgtccagcacgcgacaaaaattttccaaataatggcatagagagcttagtagacaaaatgtctcgttggaaaacgtatgcgcaagagcggcatgaatgggaagagagacaacccaaaccggtgccccctccgagacaacgctggcaacggcgtaaaaaaggagcgcatgcgcttgacgaaggaagcgatgactcagcagatgacagtagtgtgctagacctaggagggacagggaacccatttgctcatttgcgtccgcaaggtcaactagggcggttgtattga

SEQ ID NO: 327 - DNA, 1110 bp, Adenovirus A31
  MISC_FEATURE (1)..(1110): A31.orf00041 L1 52 kDa protein
atgcatcccgtcctgcgacagatgcgacctcaatccagggcacccacgccctcaggaccaatagcgcttgggggctctggcgaacctgaagagccttccacgttggagttggaagaaggagaaggcttagcccgtctgggcgctcactctcctgagcgacacccaagggtgcagcttactcgcgatagtcgtgcggcgtttgtgcctcggcaaaatatgtttcgagataacagcgggcaggaggctgaggaaatgagagactgtagatttagggccggccgcgagctgcgttgcggacttaatcgcgagcgactgctacgagaagaagattttgagcctgatgaacgttctgggattagtcccgcgcgagctcatgtttccgcggccaacttagtgtcagcctatgaacaaaccgttacagaggaacgtaattttcaaaaaagctttaataatcacgtgcgcacgctaattgcgcgtgaagaagtggctattggtttaatgcatctttgggactttgtggaagcgtatgtacataatccagcaagcaaacctttgactgctcagctttttttgatagtacaacatagtagagataatgaaacatttagagacgcaatgcttaacattgctgagccacagggtcggtggctacttgatttaattaatatcttgcaaagtattgtggttcaggaacgcagtctcagtttagcagacaaagtggctgcggtcaattattccatgttaagtttgggaaagttctatgctcgtaagatatacaaaagtccatatgttcccattgacaaggaagtaaagatagacagtttttacatgcgcatggcgttaaaggtactaacattgagcgacgatttgggagtataccgcaatgatcgaatccacaaagcggtgagcgcaagtcgtcgaagagaacttagtgacaaggaacttatgcatagcctgcaaagagcgctaacgggagccggaacagaggacgagtcctttttcgatatgggcgcagatctaaagtggcagccaagcgcccgcgccctggaggcggctggccaggataatgatgatgatgatgatgatgacgaagaccagtacgaggactga

SEQ ID NO: 328 - DNA, 1761 bp, Adenovirus A31
  MISC_FEATURE (1)..(1761): A31.orf00045 pTP DNA terminal protein
atgtccagatacatatatgaataccaccgcctcatgttagaagaccttgctcccggtgcggcggctacacttcggtggccgttatatcaagaacctcctcctcattttctagtgggctatcagtatttggtgcgcgcttgcaacgattatgtttttgactctcgagcttactcgcgcttacgatacacagaaaccatacagccaggtgtccacactgttaattggtcagtaatgaccaactgcagttacaccattaatacaggagcttaccaccgctttgtagatatggatgactttgaaaatactcttacccaaatacagcaggcagtacttgctgaacgggtagttgcagatttagctttattgcaaccattacaaggctatggtgcaacgcacatggctgatcgccaagaccgcgaaataccagtggaaaggctcatgcacgactactacaaagatcttggacgttgtcaaagtagtgtgtggggaatggcagaccgcctgcgagttcaacaagccggaccaaaagacgtggtgcttcttaaaaccatccgcagacttaaaacagcctattttaattacatgattagcaacatagttcaacatcccggtgattcacagcaaacaaaacttagcctaccttgtgactgtgactggattgacgccttccttgaaaggttttccgacccagtagatatgcagtcgcttaggtcctggcgcggagtttctacgcaacaaatcataaaatgcatagtaagtgctgtgtcgctaccaaacgcacctcgcaacgcatttcctaccctacaactaaggggtggacttttcgagcttcgcccgcgtgaaaatggtcgagcagtgacggaaactatgcgccgccgccggggcgaaatgattgaaaggtttgtagacaggctgcccgttcgccggcgacgaagaaggctaccctctccgcccgcggttcaagaagaaacaatggaagtagaagaggaacaggaagaagaagccccggaggctttcgcgcttgaagtgcgccacacggtggctgaaattattcgtcttttagaagaagaattaactgttgcagctcgaaactcccagttttttacttttgcagttgacttctacgaagccatggaacgtttggaagctctgggagacatcaacgagctcacgcttcgtcggtggattctttatttttttgtttcagaacacatagctactaccttaaactacctgtttcagcgtttacgcaactacggtgtgttcgcgcgcttcgtggaacttaacttggcgcaagtggttatgcgtgccagagacagcgacggaggagttgtgtacagccgcgtctggaacgaaactggacttaacgcattttcacagcttatgggacgcatatctaatgaccttgcagctaccattgaacgagcgggtcatggagatctccaggaggaagaaattgatcaactaatggcagaaattgcctaccaagataactcaggggatattcaggaaattttgaggcaggctgcagtaaatgacactgaaattgattctgttgaactttctttcaggttcaaaacaacgggaccagtggtgtttacacaacgtcggcaaattcagaacatcaatcgtcgtgtcgtcgcccatgccagtcaactacgggctcagcaccttccactaccagaacgtcaggccgacatacgactgcctcaagctcccgcagaagcggaagtcccagttcctgcacgccgtcgcttttaa

SEQ ID NO: 329 - DNA, 3165 bp, Adenovirus A31
  MISC_FEATURE (1)..(3165): A31.orf00046 E2B DNA polymerase
atggacagttccagactgcaagctttgatttcctgcttcagccccgctcgagccgaaatatggacgtgcagcggtcgaggcgccgttaccctttccgttgtcactttcaaggatccaaacggtgacaacgatgcaacagaacaggaagacaacgaacggcaactgccaagaagtggcatccattttcccatgcgctttttggtgcgcggtcgtcaggtgcacctcattcaacacatacagcccatgcaacgatgcgaatactgcgcacgcttttacaaacatcgacatgaatgctctgctcgccggcgagatttctacttccaccacattaacgcccactcttccaactggtggcaggagatccagtttttcccggtcggttcgcatcctcgcactgaacgtctttttattacctatgacatagaaacctacacctggatgggctcgtttggaaagcaacttgtaccatttatgctggtaatgaaactgtctggggacagtagccttgtagcgcacgcattacaacttgccttagaacttggatgggaccaatgggagaaagactcctctactttctattgtattaccccagaaaaaatgaaggtcggtcagcaattccgtacctacagaaatcgcttgcaaacgtctttagccgctaacctctggaatacttttttacaaaacaatccgcagttgcatcagtgggcgcaacagcaaaatggtctggttagtcctgacgatctgacctttgaacagcttaaaaaagctcctgtcatcaaggggcagccaagatttctagagttatacatagtggggcacaatattaatggatttgatgaaatagttcttgccgcgcaggtcataaacaatcggtcagatgtaccggcgccatttaaaatctctagaaattttattccaagagctggtaaaattttatttaatgacataacttttgctctccctaatccttactacaaaaagcgcactgacttcctgctgtgggagcaaggaggatgtgacgaccaggactttaaataccagtatttaaaagtaatggtcagggacacctttgctttaactcatacatctttaagaaaggccgctgaagcttatgccctgcctgtagaaaaaggttgttgtccctacaaggccataaatcaattttacatgcttggttcttaccgcgctgatgcagatggtttccctgtagaggagtattggaaggataaacaggaatacctcctaaaccaagaactatggaaaaaaaaaggagaaaaaaattacaatcttattctggaaactttaaactattgcgccctggatgtcatcgttacgaccttattggtagaaaaactgcgcagttcctacgcccagtttgttaatcagtcggtgggtcttcagcaggcacacttcaatgtgtttcaacgtcccaccatctcctctaactctcatgcgctttttcgacaaattttgtatcgcgcagagaaaccaaaacgcacacatttaggccctaaccttttggcgccttcgcacgaactatacgactatgttcgcgcaagcattcgcggcggcaggtgctatcctacctatataggtgttatacaggaacccatatatgtatatgatatttgtggcatgtatgcatcagcccttacacaccctatgccttggggtcctcctcttaacccttacgaacgagcattagccgtacggcagtggcaggtggcacttgaaaatcttacttccaaaattgattattttgataaaattttatgtcctggcatttttactgtggatgctgatcctccagacgagaaccagctggatgttcttcctcctttttgctctcgaaaaggcggtcgtttagcctggactaatgagagcttgcgcggcgaagtggtcaccagtgtagacttagttacactgcataatcgcgggtggcgtctgcgattattaccagacgaacgtaccaccgtttttcccacttggaaatgcattgctcgtgaatatgtacaactcaatatcgccgcaaaagaacgggcagacagggacaaaaaccaaacgctaagatctatagccaagttactttcaaacgccctgtacggatcctttgctacaaaattagataacaaaaaaattgttttttctgatcaaatggaagaggggctcataaaagaaattgcagcgggccgtttgcacatcaaatcctcatcgtttatagaaactgatactttgagtacagatgtgttacctgcctttcagcgcgcgtactcaccgcaacagctggcgctcgtaaacagcgaagccgaagacagcgatgaagatcagtgtcccacccctttttatagccccccaccagggaactctgatcacgtgacttacacctacaaaccaatcacattcatagatgctgaagaagaggatatgtgcttacacaccttggaaagttccaaccctttaattagtaacgatcggtacccttcccatgtggcctcgtttgtactggcttggactagggcctttgtgtcagagtggtcagagtttctgtacgaggaggaccgtggaatagccctaaaggacagacccattaaatctgtatacggagacacagacagtctttttgtcacagagaaaggacgccgccttatggagtcgcaaggtaagaaacgcatcaaaaagtatggagggaaacttgtttttgatccatcttatcctgagctgacctggtcggtggaatgcgaaactgtttgtgctaactgcggtgcagatgcttacgctccagagtctgtttttttggctccgaaactgtacgcccttaaatgccttcagtgtcctgattgtggcagcacttcaaaggggaaaatacgggctaaaggtcacgccacggatgccttatcttatgatctcatgttaaaatgctaccttgccgaagcacagggagaagacacacacttcagcaccagccgcaccagcttaaagcgcacgctggccagcgcccaaccaggggcgcatccgttcaccgtgaccgaaacaaccctgacgcgcaccttacgtccatggaaggacaaaaccctggtgcacttggatgctcatcgccttgttccttacagcaacagccagcccaatccccgcaacgaggaagtctgttggatcgagatggaatag

SEQ ID NO: 330 - DNA, 1053 bp, Adenovirus A31
  MISC_FEATURE (1)..(1053): A31.orf00047 IVa2 maturation protein
atgccaatggctgacggtctgaaaccattaaaaactttcaactctttgcaagagttgctctccttgggcggtgaacgccttctcagggaacttgtcaagcaaaacatgcaagtcaagcaaatgatgaacgatgtggctccgcttctccgcgacgacggcagctgcacctcgttaaactatcacttgcagccagttattggggtgatttatggacctactggatgtgggaaatctcagttgttgcgtaacttgctttccgcccagctggtcacacctgctccagaaactgttttttttattgttccccaagtggacatgattccgccttcggaaattaaatcttgggaaatgcaaatttgtgagggaaattatgccccgggaccccagggaaccattatcccacagtccggaacgctctgccctaaatttgttaagctctcgtacgatgatttaacgttagaccacaactatgatgtttctgatccaaagaacatttttgctaaagccgctgcttgcgggccaattgctataataatggatgagtgtatggaaaatctgggaagccacaaaggcgtctccaaattttttcatgcctttccttccaaacttcatgataaattccccaaatgcactggctacactgtttttgtggttctccacaacatgaatccgaggagagatctggcaggaaacattgccaatctcaaaatacaatcaaaactacatattatgtccccccgtatgcaccccacccagcttaaccgctttataaatacctacactaaaggtcttcccttagcaatcagcttgttgcttaaagatatatttcaccaccatgcccagcgctgttgctacgattggattatttacaacaccacccctgagcaagaagccctacagtggtcctacctgcatcccacagatggtcttatgccaatgtaccttaacatacaagcccacctttacaaaatattggaatacattcaccgtgttcttaatgatagggaacgatggtccagagcttaccatgtcagaaaaaacaaacatcaataa

SEQ ID NO: 331 - DNA, 435 bp, Adenovirus A31
  MISC_FEATURE (1)..(435): A31.orf00050 IX hexon associated protein
atgaacggaactgctggggacaacgctgtgctttttgatggaggggttttcagcccttatttgacgtcaaggttaccgtattgggccggagtgcgtcagaatgtggtaggatctactccagacggacgacctgtagcgcctgcaaattcgtcaacgttaacctatgcaactgtgggaccttcgccgttggataccgccgccgccgctgcagcttctgcggcggcttgtacggctcgcaatatggcagctgattttagtctctacagccaattgacatcgaatgccgcaatgcgcactgcagtccgaggagacattttaactgttatgcttgcaaagcttgagaccttaactgctcagctagaggagctgtcgcataaggttgaagaattagctgatgctaccactcccaccctaccacaacctgttagtcaataa

SEQ ID NO: 332 - DNA, 1419 bp, Adenovirus A31
  MISC_FEATURE (1)..(1419): A31.orf00051 E1B large T antigen
atggagcgagaggtcccacctgagctgggattacatgctggattacatggcaatgcatttgtggagggcatggctgaagaggagggtttgcatttactcgctggcgcggcctctaaccatgccgccgttgcaggaggagcagcagaacactacgacggaggagtaaacatggaaccacaggtgcaagaaggccatgaacctgaccccgacgaagggcctagttgtgcagttgttaaaaagcgggaaagaaaagaaagtttaaaggaaactgtccttaataggctgactgttaacctaatgtctcgcccgcgcttggaaactgtatattggcaggaattacaggatgaatttaagcagggacacatgcatctacaatacaagtacagttttgagcagctaaaaacccactggctagaaccatgggaggatttagagtgtgctattaaagcttttgctaaagtagctttacgccctgactgtacttataaaatctctaagacagtaactattacgtcatgtacgtacattataggcaatggggcagtagttgaggtggacactagtgatagagttgcttttaggtgtcgtatgcagggcatgggtccgggggtggtaggtttggatggcattacatttatgaatgttaggtttgctggagaaaaatttaagggcattatgtttgaggctaacacaagtgttgtgttgcatggtgtgtactttcttaactttaataacacgtgtgtagagtgttggaataaggtttctgccaggggttgcactttttatgggtgttggaaggccttggtaggtaggcccaaaagtaaaatgtctgtaaaaaagtgcttgtttgagaaatgcgtgcttgctttaattgtagaaggggatgctcacattagacataatgcagcttcagaaaatacctgttttattctactgaagggaatggctattttaaagcacaatatggtttgcggggtgtctgatcagacaatgcgacggtttgtcacctgtgctgatggaaattgtcacactttgaaaactgttcatattgtgagtcatgctagatattgttggcctgtgtgtgaccataacatgtttatgcgctgcacaatacatttgggtctccggcggggtgtgtttagaccttcccagtgtaactttagtcattcaaatgttatgttggagcccgaggcgttttccagagtgagtttaaatggggtgtttgatttatctgtggaattatgcaagattatcaggtatgacgatgctgcccgtcatcgctgccggcagtgcgaatgtggcagtagtcatctagaacttcgccccgtcatgctgaatgtaactgaggagctaagaagtgaccatcttaccctgtcttgtctgcgaaccgactatgagtctagcgatgaagacaactaa

SEQ ID NO: 333 - DNA, 873 bp, Adenovirus A31
  MISC_FEATURE (1)..(873): A31.orf00053 E1A 29.5 kDa protein
atgagaactgaaataactcctttggtgttgtcctatgaagaagccgatgacatattggagcatttggtggagaacttttttaacgaggtacccagcgatgatgatttttatgttccctcgcttcacgaactgtatgatattgatgtggagtctgccggtgaggattctaatgaacaggctgtgaatgatttttttccggaatcgtttattttagctgctgctgaaggggtaatattaccggagccccctgtgctttctcctatttgtgaacctattggtggtgaatgtatgccacagttgtgttctgaagatatggatttgttgtgttatgaggcggcttttccctgtagcgactctgaaggtgagcaagacgaaaacggaatggcgcatgtttctgcagctgcagcggcggctgctgctaatagagaacgtgaggagtttcagttagaccatccggagttgcctggacatgattgtaagtcctgcgagtaccaccggaatagtactggaaacactgacttaatgtgctctttgtgttatctgcgagcctacagcatgtttatttacagtaagtgcgctatttggacggtgggaggtgtatttttttatttgttcttagcagtaaagacttttttgtttttaggtcctgtttctgacaacgaaccggaacctgacagcactacggatgacaatgagagaccgtcgcccccagaactgggagatgtagttccggaaggagtagtgaaacctgtacctcagcgggtgactgggaggcgacgtgctgtggaaagtattttggatttgatccaagaggaagaatgtgaacaaacagtgcctgttgatttgtcagtgaaacgccctaaatgtaattaa

SEQ ID NO: 334 - DNA, 156 bp, Artificial Sequence
  A31.orf00054 hypothetical protein
atgttttttgggcgttgttgtgtaagttttgtgtttttggcggtaaaagtgatttgcggaagtgaaaactgtttacgtcagttttattataggcgagtaatatttaccgagggcaaagtgaactttgagccactacgtggtggtttcgatacgtga

SEQ ID NO: 335 - DNA, 120 bp, Artificial Sequence; identical to SEQ ID NO: 228
  A31.orf00055 hypothetical protein

SEQ ID NO: 336 - DNA, 378 bp, Adenovirus B3
  MISC_FEATURE (1)..(378): B3.orf00001 E4 ORF1 protein
atggctgatgaggctttgtatgtctatttagagggaccgggagcaacgttgcctgaacagcagcagagaaataattatattttttattctcctgtgccttttactttgtatccgcgaggggtggctttgctatacttaaaattaagcataattatacccagaggctatgttggctgttttttctctttaactgatgctaacatgtctggattgtatgcttcatcaagaattattcatgctggccaccgcgaggaactttcggtgctgttgtttaatcacaatgacaggttttacgagggtcgagctggagaccctgtggcttgtcttgtgatggaaagactgatttttccacctgttcgacaggctactatgatatga

SEQ ID NO: 337 - DNA, 435 bp, Adenovirus B3
  MISC_FEATURE (1)..(435): B3.orf00002 E4 ORF2 protein
atgacgcttgtttcttttattttgcagactaattcaaaactaacaatgttggagcgcagcgcggtaacctattgtatttgcatcccaacggttttgaatgtttctttggaaaatttttcttttattcaatttttacaagaaactctgcctgattatatttccagcaactttgatgatattactggtggttcccagtatgcttattctaatcttgtttttgctggagccaattggggaggtctgcgcttgtactgcactgtagcgtcccctgctattgttcccggggggcttctggctaagcagtttggtgataatatgagagagtatctacaactagaacttagagaagaacttagagccaagggcatgtcaattgatgatgccattcttaatttgctacaggtgacacaggagcaagatattttgtcattatga

SEQ ID NO: 338 - DNA, 336 bp, Adenovirus B3
  MISC_FEATURE (1)..(336): B3.orf00003 E4 ORF3 protein
atggtggtggagggcgccctccgggacctgtttgtaatgtgtggtttggatttaccacaagaactgacacgaataattcaaggctggaaagctgaaaattatctgggaatggtgcaggaatgtaatatgatgtttgaggagttagaaaatgctccttcttttggtattcttttgtttttggatgtgcgcgtggaggctttgttggaagccaccgttgagcaccttgaaaatcgcatttcttttgatttagctgtgctttttcaccaacacagtgggggcgatagatgccatctgcgcgatctacaatttgaagtactgcgagatcgtttggaataa

SEQ ID NO: 339 - DNA, 900 bp, Adenovirus B3
  MISC_FEATURE (1)..(900): B3.orf00007 E4 ORF6 34-kDa
atgtcaggaagcaactccattatgacaaggttgcgcgcacgctccacatcatgcgccagacatcacccttacaccagagcccaattaccacgatgtgaggaaaatgaaacccgagcttctatgactgaagaccacccgctgttgccagattgtgatactatgactatgcatagtgtaagttgtgttcgtggtcttccttgttctgccagctttactgttctgcaagagtttcccattccttgggatatgtttttaaatccagaggagttaaaaattatgagaagatgcatgcatttatgtctttgttgtgctactatagatatttttcagtctcaagtgattcatggtcgagagaattgggttcttcattgtcattgtaatcagcagggttcacttcaatgcatggctgggggagcggtgttggcagtgtggttccggaaggttatattgggttgcatgattaaccaacgttgtccatggtacagacaaattgttaatatgcacatgccaaaagagatcatgtatgtgggtagtgtgtttttgagggaacgacatttaatttatattaaactttggtatgatggtcatgcaggggcgattatatcagatatgagttttggctggagcgcttttaattatggtttattaaacaatattgtgataatgtgctgtacctactgtagtaatctaagtgaaatcagaatgcgttgctgcgcgcatcgcaccagaaagttaatgttaagggctattaaaatcatgcttcaggacactgcggaccccgatcccataaacagcagtcgcacggagcgacgcagacagcggttgcttgtgggtttgatgagacacaatcgcccgattccgttttcggattatgattcccatcgttcttcttccagatga

SEQ ID NO: 340 - DNA, 252 bp, Adenovirus B3
  MISC_FEATURE (1)..(252): B3.orf00008 E4 ORF6/7 protein
atgaccgtgattcagactccggagtcgcatccgcaacagttggactgtgaaagcgctttaaaagactatcccgatgcatttttatgtattactgaccccagattggctcgctctgaaactgtttggaatgtggaatctaaaactatgtctatctctaatggtatccaaatgtttaaagctgtgcgtggggagagattggtgtattctgttaaatgggaagggggaggcaaaataactactcgaatactgtaa

SEQ ID NO: 341 - DNA, 960 bp, Adenovirus B3; identical to SEQ ID NO: 132
  MISC_FEATURE (1)..(960): B3.orf00009 L5 protein IV (fiber)

SEQ ID NO: 342 - DNA, 162 bp, Adenovirus B3
  MISC_FEATURE (1)..(162): B3.orf00010 U protein
atgaagattgtgggcaaagaagaggaaataaaatttgacatccctttcaaagtgtggagaaagtatgccaccctccgacgtttagagtaccagagttgggaagagggtgaggtgctgctggtagaaagttttgacaaagactgtattgctgatttcaagtaa

SEQ ID NO: 343 - DNA, 411 bp, Adenovirus B3
  MISC_FEATURE (1)..(411): B3.orf00011 E3B E3 15.3-kDa
atgactgacccaatcgccacatcatccaccgctgccaaggagctgctggacatggacggacgtgcctcagaacagcgactcatccaactacgcattcgtcagcagcaggaacgagcagtaaaagagctaagggatgccattgggattcaccagtgcaaaaaaggcatattctgcttagtaaaacaatccaaaatctcctacgagatcaccgctactgaccatcgtctctcatacgagctcggtccgcagcgacaaaaattcacctgcatggtgggaatcaaccccatagttatcacccagcagtctggagatactaagggttgtatccagtgttcctgtgattccaccgagtgcatctacacactgctgaagaccctctgcggccttcgagacctcctacccatgaactaa

SEQ ID NO: 344 - DNA, 438 bp, Adenovirus B3
  MISC_FEATURE (1)..(438): B3.orf00013 E3 14.9 kDa protein
atgttgcggcacttcttaggcttatttaaaaccatgcaggctatgctaccagtcattttaattttgctactaccctgcattcccctagcttccaccgccactcgcgctacacctgaacaacttagaaaatgcaaatttcaacaaccatggtcatttcttgattgctaccatgaaaaatctgattttcccacatactggatagtgattgttggaataattaacatactttcatgtacctttttctcaatcacaatataccccacatttaattttgggtggaattctcccaatgcactgggttacccacaagaaccagatgaacatattccactacaacacatacaacaaccactagcactggtacagtatgaaaatgagccacaaccttcactgccccctgccattagttacttcaacctaaccggcggagatgactga

SEQ ID NO: 345 - DNA, 276 bp, Adenovirus B3
  MISC_FEATURE (1)..(276): B3.orf00015 E3 10.3 kDa protein
atgatccctagaaatttcttcttcaccatactcatctgtgcttttaatgtctgtgctactttcacagcagtagccactgcaagcccagactgtataggaccatttgcttcctatgcactttttgccttcgttacttgcatctgcgtgtgtagcatagtctgcctggttattaattttttccaactggtagactggatctttgtgcgaattgcctacctacgtcaccatcccgaataccgcaatcaaaatgttgcggcacttcttaggcttatttaa

SEQ ID NO: 346 - DNA, 234 bp, Adenovirus B3
  MISC_FEATURE (1)..(234): B3.orf00017 E3B E3 9-kDa
atgatattgtttcaatcaaataccactacctcctatgcatacacaaacattcagcctaaatacgctatgcaactagaaatcacaatactaattgtaattggaattcttatactatctgttattctttattttatattctgccgtcaaatacccaatgttcatagaaattctaaaagacgtcccatctattctcctatgattagtcgtccccatatggctctgaatgaaatctaa

SEQ ID NO: 347 - DNA, 570 bp, Adenovirus B3
  MISC_FEATURE (1)..(570): B3.orf00019 E3B E3 20.5-kDa
atgatttccactacaatttttatcattactagccttgcagctgtaacttatggccgttcacacctaactgtacctgttggctcaacatgtacactacaaggaccccaagaaggctatgtcacttggtggagaatatatgataatggagggttcgctagaccatgtgatcagcctggtacaaaattttcatgcaacggaagagacttgaccattattaacataacatcaaatgagcaaggcttctattatggaaccaactataaaaatagtttagattacaacattattgtagtgccagccaccacttctgctccccgcaaatccactttctctagcagcagtgccaaagcaagcacaattcctaaaacagcttctgctatgttaaagcttccaaaaatcgctttaagtaattccacagccgctcccaatacaattcctaaatcaacaattggcatcattactgccgtggtagtgggattaatgattatatttttgtgtataatgtactacgcctgctgctatagaaaacatgaacaaaaaggtgatgcattactaaattttgatatttaa

SEQ ID NO: 348 - DNA, 540 bp, Adenovirus B3
  MISC_FEATURE (1)..(540): B3.orf00020 E3B E3 20.1-kDa
atggcttctgttacagctctaattattgccagcattgtcactgtcgctcacgggcaaacaattgtccatattaccttaggacataatcacactcttgtagggcccccaattacttcagaggttatttggaccaaacttggaagtgttgattattttgatataatttgcaacaaaactaaaccaatatttgtaatctgtaacagacaaaatctcacgttaattaatgttagcaaaatttataacggttactattatggttatgacagatccagtagtcaatataaaaattacttagttcgcataactcagcccaaattaacagtgccaactatgacaataattaaaatggctaataaagcattagaaaattttacatcaccaacaacacccaatgaaaaaaacattccaaattcaatgattgcaattattgcggcggtggcattgggaatggcactaataataatatgcatgctcctatatgcttgttactataaaaagtttcaacataaacaggatccactactaaattttaacatttaa

SEQ ID NO: 349 - DNA, 519 bp, Adenovirus B3
  MISC_FEATURE (1)..(519): B3.orf00021 E3A E3 gp19-kDa
atgggggccatactagtcgtgcttgctttactttcgcttttgggtctgggctctgctaatctcaatcctctcgatcacgatccatgtttagacttcgacccagaaaactgcacacttacttttgcacccgacacaagccgtctctgtggagttcttattaagtgcggatgggactgcaggtccgttgaaattacacataataacaaaacatggaacaataccttatccaccacatgggagccaggagttccccagtggtatactgtctctgtccgaggtcctgacggttccatccgcattagtaacaacactttcattttttctgaaatgtgcgatctggccatgttcatgagcagacagtatgacctatggcctcccagcaaagagaacattgtggcattttccattgcttattgcttggtaacatgcatcatcactgctatcatttgtgtgtgcatacacttgcttatagttattcgccctagacaaagcaatgaggaaaaagagaaaatgccttaa

SEQ ID NO: 350 - DNA, 321 bp, Adenovirus B3
  MISC_FEATURE (1)..(321): B3.orf00024 E3 11.7 kDa protein
atgtctaatggtggtgcggctgagctagctcgactgcgacacctagaccactgccgccgctttcgctgcttcgcccgggaactcaccgagttcatctacttcgaactctccgaggagcaccctcagggtccggcccacggagtgcggattaccatcgaagggggaatagactctcgcctgcatcgcatcttctcccagcggcccgtgctaattgaacgcgaccagggaaatacaaccatctccatctactgcatctgtaaccaccccggattgcatgaaagcctttgctgtcttgtttgtgctgagtttaataaaaactga

SEQ ID NO: 351 - DNA, 684 bp, Adenovirus B3
  MISC_FEATURE (1)..(684): B3.orf00025 L4 protein pVIII
atgagtaaagagattcccacgccttacatgtggagctatcagccccaaatggggttggcagcaggcgcttcccaggactactccacccgcatgaattggcttagcgccgggccctcaatgatatcacgggttaatgatatacgagcttatcgaaaccagttactcctagaacagtcagctctcaccaccacaccccgtcaacaccttaatccccgaaattggcccgccaccctggtgtaccaggaaaatcccgctcccaccaccgtactacttcctcgagacgcccaggccgaagttcagatgactaacgcaggtgtacagctggcgggcggttccgccctatgtcgtcaccgacctcaacagagtataaaacgcctggtgattagaggccgaggtatccagctcaacgacgagtcggttagctcttcgcttggtctgcgaccagacggagtcttccaaatcgccggctgtgggagatcttccttcactcctcgtcaggctgtgctgactttggagagttcgtcctcgcagccccgctcgggcggcattggaactctccagtttgtggaggagtttactccctctgtctacttcaaccccttctccggctctcctggccagtacccggacgagttcataccaaacttcgacgcaatcagcgagtcagtggatggctatgattga

SEQ ID NO: 352 - DNA, 297 bp, Adenovirus B3
  MISC_FEATURE (1)..(297): B3.orf00026 L4 33-kDa protein
gtgaccagaaaaccagcagttagaaaatccacaacaagtgcaccaggaggaggactgaggatcacagcgaacgagccagcgcagaccagagagctgaggaaccggatctttccaaccctctatgccattttccagcagagtcgggggcaagagcaggaactgaaagtaaaaaaccgatctctgcgctcgctcaccagaagttgtttgtatcacaagagcgaagaccaacttcagcgcactctcgaggacgccgaggctctcttcaacaagtactgcgcgctgactcttaaagagtag

SEQ ID NO: 353 - DNA, 2487 bp, Adenovirus B3
  MISC_FEATURE (1)..(2487): B3.orf00028 L4 100-kDa protein
atggaaactcagccatcactgccaacatcgctgcaagcaccatcacacctcgcccccagcagcgacgaggaggagagcttaaccaccccaccacccagtcccgctaccaccacctctaccctcgatgatgaggaggaggtcgacgcagcccaggagatgcaggcgcaggataatgtgaaaacggaagagattgaggcagatgtcgagcaggacccgggctatgtgacgccggcggagcaccaggaggagctgaaacgctttctagacagagaggatgacgaccgcccagagcatcaagcagatggcgtttaccaggaggctgggatcagggatcatgtcgccgactacctcaccggccttggtggggaggacgtgctcctcaaacatctagcaaggcagtcgatcatagttaaagacgcattgctcgatctcactgaagtgcccatcagtgtggaagagcttagccgcgcctacgagctgaacctcttttcgcctcaggtaccccccaagcggcagccaaacggcacctgcgaggccaaccctcgactcaacttctatccagcttttactatccccgaagtgttggccacctaccacatctttttcaagaaccaaaagattccagtctcctgccgcgccaaccgcacccgcgccgatgccctgctcaacttgggtccgggagctcgcttacctgatatagcttccttggaagaggttccaaagatctttgagggtctgggaagtgatgagacacgggccgcaaatgctctgcaacagggagagaatgacatggatgaacaccacagcgctctggtggaactggagggtgacaatgcccggattgcagtgctcaagcgcagtatcgtggtcacccattttgcctaccccgctgttaacctgccccccaaagttatgagcgctgtcatggaccatctgctcatcaaacgagcaagacctctttcagaaaaccagaacatgcaggatccagacgcctcggacgagggcaagccggtagtcagtgacgagcagctatctcgctggctgggtaccaactccccccgagatttggaagagaggcgcaagcttatgatggctgtagtgctagtaactgtggagctggagtgtctgcgccgctttttcaccgaccctgagaccctgcgcaagctagaggagaacctgcactacacctttagacatggcttcgtgcggcaggcatgcaagatctccaacgtggagcttaccaacctggtttcttacatgggcattttgcatgagaaccgactagggcagagcgtcctgcacaccacccttaaaggggaggcccgccgtgactacatccgagactgtgtctacctctacctctgccatacctggcaaactggtatgggtgtgtggcaacagtgtttggaagagcagaacctaaaagagctggacaagctcttgcagagatccctcaaagccctgtggacaggttttgatgagcgcaccgtcgcctcggacctggcagacatcatcttccccgagcgtctcagggttactctgcgaaacggcctgccagactttatgagccagagcatgcttaacaactttcgctctttcatcctggaacgctccggtatcctgcctgccacctgctgtgcgctgccctccgactttgtgcctctcacctaccgcgagtgcccaccgccgctatggagccactgctacctgttccgcctggccaactacctctcctaccactcggatgttatagaggatgtgagcggagacggcctgctggaatgccactgccgctgcaatctttgcacaccccaccgctcccttgcctgcaacccccagttgctgagcgagacccagattatcggcaccttcgagctgcagggtcccagaagtaaaggcgaggggtcttctccggggcagagtttgaaactgacaccggggctgtggacctccgcctacctgcgcaagtttcaccccgaggactaccatccctatgagatcaggttctatgaggaccaatcacatcctcccaaagtcgagctctcagcctgcgtcatcacccagggagcaattctggcccaattgcaagccatccaaaaatctcgccaagaatttctgctaaaaaagggaaacggggtctaccttgaccctcagaccggtgaggagctcaacacaaggttcccccaggatgtcccatcgccgaggaagcaagaagttgaaggtgcagctgtcgcccccagaggatatgaaggaagactgggacagtcaggcagaggaggagatggaagattgggacagccaggcagaggaggtggacagcctggaggaagacagtttggaggaggaagacgaggaggcagaggaggtggaagaagcaaccgccgccaaacagttgtcatcggcggcggagacaagcaagtccccagacagcagcacggctaccatctccgctccgggtcggggggcccagcggcggcccaacagtag

SEQ ID NO: 354 - DNA, 1554 bp, Adenovirus B3
  MISC_FEATURE (1)..(1554): B3.orf00031 E2A DNA binding protein DBP
atggccagccgcggaggaaatcagtcaagcgaccgccaccgggagcacacccccgaacgcggaatgagctctgccagccatccgcctccaaggccagaccgcagcccatctcagtcgcctccacctctgcccccgaagaggaacacctaccgtcgtgtggggtccggttcttctaccgagagccaggtggtattggtaagcgaaacttcgcagtcatccctgtctccggagcggagcaacagtcctcccccgatccctcccaagaagaagcccaggaagaccaagcatgtccctctgcaagacatcagccaggatagtgaagaagaaagagaacaggctcagttggtggccgtgggcttcagctaccccccggtgcgcatcattgagaaggatggcaagagaagtgttgagaagatcgacaagaatgaccctatagctaaaggagctacttttattgctgttaggaatcctttgagtctgcccctggtatctgcctgggagaagggcatggaagtgatggctgtgctaatggaaaggtacaggctggataatgatctgagaacctctttcaagctgatgccagagcagcacgagcaatacaagcgtatctgccaccagtatgtgaacgaggagcaccgtggcatcccgctgacatttaccagcatgaagaccttgacaacaatgatgggaagattcatgcagggattggtacattattattctgagatcgcccacaataattgggagtgcaccgggtgcgctctgtgggctcatggatgcaccgattatgaaggcaaggtgaaatgcctgcatggcactatcatgatccagaaggaccacattatcgagatggatgtggcgagcgagaacgggcagcgcgctatgaaggagaatccagacagagccaagatcacccaaaaccgctggggcagaaatgtggttcagttggccaacaacgatgcccgctgttgtgtgaatgatgccaactgtactactaatcaattttccagcaagtcctgtgggatgttctacaccgagggaagtaaggcccaggaagcttttaagcagtacgaagccttcatgaaggctgtgtacccagggataactcccgaccaagccaggatgatgctgatccccattcattgtgattgcaaccacaagccaggctgcgctcccgtgatgggcaggcagacatgtaagatgaccccctttgggatggccaatgctgaagacttggatgtgactaccatcagtgacccaaccgtgttggcaagcgtaagacacccagcgttgatagtgttccagtgttgcaacccagtgtatcgcaactcccgtgtccagaatgccggccccaactgtgatttcaagatctctgctcctgacctgcttggcgctatgcaactgaccagaaagttgtggcaagacacctttcccgagattccagttcccaagctggtaatccccgagttcaagtggcagaacaggttacagttccgcaacgtatccctgcccgcgggtcactctgactcccgccagaacccattcgacttctga

SEQ ID NO: 355 - DNA, 630 bp, Adenovirus B3
  MISC_FEATURE (1)..(630): B3.orf00033 L3 23-kDa protein (protease)
atgacatgcgggtccggaaacggctccagcgagcaagagctcaaagccatcgtccgagacctgggctgcggaccctatttcctgggaacctttgacaagcgtttcccggggttcatggcccccgacaagctcgcctgcgccatagtcaacactgccggacgcgagacggggggagagcactggctggcttttggttggaacccgcgctacaacacctgctacctttttgatccttttgggttctcggatgagcggctcaaacagatttaccagtttgagtacgaggggctcctgcgtcgcagtgcccttgctaccaaagaccgctgcatcaccctggagaagtctacccaaagcgtgcagggtccgcgctcagccgcctgtggacttttttgctgtatgttccttcatgcctttgtgcactggcccgaccgccccatggacggaaaccccaccatgaagttgctgactggggtgtccaacagcatgctccaatcaccccaagtccagcccaccctgcgccgcaaccaggaggtgctataccgcttcctaaacacccactcatcttactttcgttctcaccgcgcgcgcattgaaagggccaccgcgtttgaccgtatggatatgcaataa

SEQ ID NO: 356 - DNA, 2835 bp, Adenovirus B3; identical to SEQ ID NO: 192
  MISC_FEATURE (1)..(2835): B3.orf00036 L3 protein II (hexon)

SEQ ID NO: 357 - DNA, 132 bp, Adenovirus B3
  MISC_FEATURE (1)..(132): B3.orf00037 L3 hexon
atgtatgcccattggggcatcatcgatggggtggccatcttgaaagcaactcagcctcggcgcgcgacctcttcctttctcctctgctgcggcggcgtggtgatgatacatacacacagacaagcaagttaa

SEQ ID NO: 358 - DNA, 753 bp, Adenovirus B3
  MISC_FEATURE (1)..(753): B3.orf00038 L3 protein pVI
atggaagacatcaatttttcatccctggctccgcgacacggcacgaggccgtacatgggcacctggagcgacatcggcacgagccaactgaacgggggcgccttcaattggagcagtatctggagcgggcttaaaaattttggctcgaccgtaaaaacctatgggaacaaagcttggaacagcagcacagggcaggctctgagaaataagcttaaggaacaaaacttccaacagaaggtggtcgatgggatcgcctctggtattaacggcgtagtggatctggccaaccaggctgtacaaaaacagataaacagccgcctggacccgccgcccgcaacccctggtgaaatggaagtggaggaagaacttcctccgctggaaaagcggggcgacaagcgtccgcgacccgagctagagcagacgctggtgacgcgcgcagacgagcccccttcatatgaggaggcagtaaagctcggaatgcccactaccaggcctgtagctcacatggctaccggggtgatgaaaccttctcagtcacatcgacccgccaccttggacttgcctcctccccctgcttctgcggcgcctgttcccaaacctgtcgctaccagaaagcccaccgccgtacagcccgtcgccgtagccagaccgcgtcctgggggcacaccgcgcccgaaagcaaactggcaaagtactctgaacagcatcgtgggtctgggcgtgcagagtgtaaagcgccgtcgctgctattaa

SEQ ID NO: 359 - DNA, 228 bp, Adenovirus B3
  MISC_FEATURE (1)..(228): B3.orf00039 L2 protein pX
atggccctcacttgccgccttcgcgtccccattactggctaccgaggaagaaactcgcgccgtagaaggatgttggggcgagggatgcgccgccacagacgaaggcgcgctatcagcagacgattagggggtggctttttgccagctcttatacccatcatcgccgcagcgatcggggcgataccaggcatagcttcagtggcggttcaggcctcgcagcgccactaa

SEQ ID NO: 360 - DNA, 1050 bp, Adenovirus B3
  MISC_FEATURE (1)..(1050): B3.orf00041 L2 protein pV
atgtccaagcgcaaatacaaggaagagatgctccaggtcatcgcgcctgaaatctacggtccgccggtgaaggatgaaaaaaagccccgcaaaatcaagcgggtcaaaaataacaaaaaggaagaagatgacgatgatgggctggtggagtttgtgcgcgagttcgccccaagacggcgcgtgcagtggcgcgggcgcaaagtgcgtcaagtgctcagacccgggaccactgtggtttttacacctggcgagcgttccagcactacttttaaacggtcctatgatgaggtgtacggggatgacgatattcttgagcaggcggcagaccgccttgacgagtttgcttatggcaagcgcactagatccagtcccaaagaggaggctgtgtccattcctttggatcatggaaatcccacccccagcctcaaaccagtcaccctgcagcaagtgctgcccgtgcctgcgcggagaggcgtaaagcgcgagggtgaggacctatatcccaccatgcagctaatggtgcccaagcgccagaggctagaagacgtactggagaaaatgaaagtggatgccgatatccagcctgaggtcaaagtaagacctatcaaggaagtggcgccaggtttgggagtacaaaccttcgacatcaagattcccaccgagtccatggaagtgcagaccgaacctgcaaaacccaccacctcaattgaggtgcaaacggaaccctggatgcccgcgcccgttgccgcccccagcaccactcgaagatcacgacgaaagtacggcccagcaagtctgctaatgcccaactatgctctgcacccatccatcattcccactccgggttacagaggcactcgctactatcgaaaccggagcaacacctctcgccgccgcaaaccacctgcaagtcgcactcgccgtcgccgccgccgcaacactgccagcaaattgactcccgccgccctggtgcggagagtgtaccgcgatggtcgcgctgaacctctgacgctgccgcgcgcgcgctaccatccaagcatcaccacttaa

SEQ ID NO: 361 - DNA, 579 bp, Adenovirus B3
  MISC_FEATURE (1)..(579): B3.orf00044 L2 protein pVII
atgtccattctcatctcgcccagtaataataccggttggggactgtatgcgcccaccaagatgtatggaggcgcccgcaagcgctctacccagcatcctgtgcgcgttcgcggtcatttccgcgctccctggggcgcactcaagggtcgtacccgcactcggaccacggtcgatgatgtgatcgaccaggtggtcgccgatgctcgtaattatactcctactgcgcctacatctactgtggatgcagttattgacagtgtggtggcagacgcccgcgcctatgctcgccggaagagccgaaggaggcgcatcgccaggcgccacagggctactcccgccatgcgagccgcaaaagctattctgcggagggccaaacgtgtggggcgaagagccatgcttagagcggccagacgcgcggcttcaggtgccagcagcggcaggtcccgcaggcgcgcggccacggcggcagcagcggccattgccaacatggcccaaccgcgaagaggcaatgtgtactgggtgcgtgatgccactaccggccagcgcgtgcccgtgcgcacccgcccccctcgcacttag

SEQ ID NO: 362 - DNA, 1635 bp, Adenovirus B3; identical to SEQ ID NO: 164
  MISC_FEATURE (1)..(1635): B3.orf00045 L2 protein III (penton)

SEQ ID NO: 363 - DNA, 1767 bp, Adenovirus B3
  MISC_FEATURE (1)..(1767): B3.orf00046 L1 protein pIIIa
atggaacagcagcaggcaccggaccccgcaatgcgggcggcgctgcagagccagccgtccggcattaactcctcggacgattggacccaggccatgcaacgcataatggcgctgacgacccgcaaccccgaagcctttagacagcaaccccaggccaaccgcctttctgccatactggaggccgtagtgccctcccgctccaaccccacccacgagaaggtcctggctatcgtgaacgcgctggtggagaacaaggccatccgtcccgatgaggccgggctggtatacaatgctctcttggagcgcgtggcccgttacaacagcagcaacgtgcaaaccaacctggaccggatggtgaccgatgtgcgcgaggccgtgtctcagcgcgagcgattccagcgcgacgccaacttggggtcgttggtagcgctaaacgctttcctcagcacccagcccgccaacgtgccccgtggtcagcaagactatacaaactttttgagtgcattgagactcatggtagctgaggtgccccagagcgaggtgtaccagtccgggccagattacttcttccagaccagcagacagggcttgcagacagtgaacctgactcaggctttcaagaacctgaagggtctgtggggagtgcacgccccagtaggggatcgcgcgaccgtgtctagcttgctgactcccaactcccgcctgctgctgctgctggtatccccctttactgacagcggtagcattgaccgcaactcgtacttgggctacctgcttaacctgtatcgcgaggccataggacagagccaggtggacgagcagacctatcaagaaatcacccaagtgagccgcgccctgggtcaggaagacacgggcagtttggaagccaccctgaacttcttgctaaccaaccggtcacagaagatccctcctcagtatgcgcttaccgctgaggaggagcggatcctcagatacgtgcaacagagcgttggactgttcctgatgcaggagggggcgacacctaccgccgcgctggacatgacagctcgaaacatggagcccagcatgtatgctagtaacaggcctttcattaacaaactgctggactacctgcacagggcggccgccatgaactctgattatttcaccaatgctatcctgaacccacactggctgcccccacctggtttctacactggcgagtacgacatgcccgaccccaatgacgggttcctgtgggacgatgtggacagcagcatattttccccgcctcccggttatacagtttggaagaaggaagggggcgatagaagacactcttccgtgtcgctatccggaacggctggtgctgccgcgaccgtgcccgaagctgcaagtcctttccctagcttgcccttttcactaaacagcgttcgcagcagtgaactggggagaataacccgcccgcgcttgatgggcgaggatgagtacttgaatgactctttgctgaggccagagagggaaaagaacttccccaacaatggaatagagagtctggtggataagatgagtagatggaagacctatgcgcaggatcacagagacgagcccaggatcttgggggctacaagcagaccgatccgtagacgccagcgccacgacaggcagatgggtcttgtgtgggacgatgaggactctgccgatgatagcagcgtgttggacttgggtggaagaggagggggcaacccgttcgctcatctgcgtcccagattcgggcgcatgttgtaa

SEQ ID NO: 364 - DNA, 1158 bp, Adenovirus B3
  MISC_FEATURE (1)..(1158): B3.orf00047 L1 52/55-kDa protein
atgcatccagtgctgcgacagatgcgcccccagcaacaggccccttctcagcaacagccacaaaaggctcttcttgctcctgcaactactgcagctgcagccgtgagcggcgcgggacagcccgcctatgatctggacttggaagagggcgagggattggcgcgcctgggggctccatcgcccgagcggcacccgcgggtgcaactaaaaaaggactctcgcgaggcgtacgtgccccagcagaacctgttcagggacaggagcggcgaggagccagaggagatgcgagcatctcgatttaacgcgggtcgcgagctgcgccacggtctggatcgaagacgggtgctgcaagacgaggattttgaggtcgatgaagtcacagggatcagcccagctagggcacatgtggccgcggccaacctagtctcggcctacgagcagaccgtgaaggaggagcgcaacttccaaaaatcttttaacaaccatgtgcgcaccctgatcgcccgcgaggaagtgaccctgggtctgatgcatctgtgggacctgatggaggctatcgcccaaaaccccactagcaaaccactgacagctcagctgtttctggtggttcaacatagcagggacaacgaggcattcagggaggcgttgttgaacatcaccgagcctgatgggagatggctgtatgatctgatcaacatcctgcaaagtattatagtgcaggaacgtagcctgggtttggctgagaaagtggcagctatcaactactcggtcttgagcctgggcaaatactacgctcgcaagatctacaagaccccctacgtacccatagacaaggaggtgaagatagatgggttttacatgcgcatgactctgaaggtgctgactctgagcgacgatctgggggtgtatcgcaatgacaggatgcaccgcgcggtgagcgccagcaggaggcgcgagctgagcgacagagaacttatgcacagcttgcaaagagctctaacgggggccgggactgatggggagaactactttgacatgggagcggatttgcaatggcaacccagtcgcagggccatggaggctgcagggtgtgagcttccttacatagaagaggtggatgaagtcgaggacgaggagggcgagtacttggaagactga

SEQ ID NO: 365 - DNA, 1923 bp, Adenovirus B3
  MISC_FEATURE (1)..(1923): B3.orf00049 E2B pTP
atgaactacttcatgccgctgcgcaacatctggaaccgcgtgcgcgagttcccacgtgcatccaccaccgcctccggtatcacctggatgtccaggtacatctacggctaccaccgcctcatgctggaagacctcgcccccggagccccggctacagagcgatggcccctgtaccgccagccaccgccacactttctcattggctaccagtacctggtgcgcacctgcaacgattacatctttgacacccgcgcatactcgcgcctcaagtacaccgagctcgtgcgccctgggcaccagacagtcaactggtcagtcatggccaactgctcctacacaatcaacaccggggcctaccaccgcttcgtggactttgacgacttccaagccaccctcacccaggtgcagcaagccatcctcgccgaaagggttgtagcggacctggcacttgtccagcccatgcgcgggttcgggatcactcgcatgcatggcagagcgggcgaagaagaagtgcccgtggaacgactcatgcaagactactataaagatctggccagatgtcaggataatgcttggggaatggctcatcgcctgcgtatccaacaagccggacccaaagacctggtgctcctcgccaccatccgccgtctcaaaactgcctattttaatttcatcaccagcagcatcgtctcaccctcccaagaggaggaaggagaagaaagagagaaccccgaccgagcgtctagccgcccccgcccgcaagaaacagtgctcagcctaccttgcgattgcgactggttagacgctttcgtcgaaaggttttcagatcccgtggatcttgagacgatcaggtccttgcgcggagtacctacggggcaattgataaaatgcataatcagcgcggtgtccctgcccaacggagagcctcccagtcaccacttcagggagatgcgcggaggcgtcttcactctgagacccagggagaacggtcgtgccgtcaccgagaccatgcgccgccgccgcggagaggtcattgaaagattcatcgaccgtctgcccgtgcgccgccggcgtcgccgcgttccccctcctcctgcagccccacctgaagaggaagagatgttagtggaagaagaagagattgaggaagaaatcccaggggctttcgagcgcgaggtgcgcaccaccatcgccgaacttatccgtcttctggaagaggagttgaccgtgtccgcgcgtaactcccagttttttaactttgccgtggacttctacgaggccatggagcgcttggaagcgctgggcgatgtcagcgagatgccgctgagacgatggatcatgtatttcttcgtcaccgagcacatcgccaccacactcaactaccttttccagcgcctatgcaactatgcggtcttcacccgccacgtggagctcaacctcgcccaggtggtcatgcgcgcgagagatcccgtgggggctgtggtctacagccgcgtctggaacgaggcgggcatgaatgcattctctcaactcattgggcgcatctccaacgacctcgcggccaccgtcgagagagcgggccgcggagatcttcaagaggaagagatcgagcagttcatggccgagatcgcctaccaggacaactctggcgacgtgcaagaaatccttaggcaagccgccgtcaacgataccgagattgattctgttgaactctctttcaggttcaagctcacggggccggtagctttcacccagaggcgtcagatccaggatgtcaaccgccgcgtcgtcgcgcatgcgagtcttctcagggcgcagtaccagaacctacccgcgcgcggcgccgacgtaccactgccagccatgccgccgggtcccgagccgcccctgccgcccggtgcgcgccctcgacaccgcttctaa

SEQ ID NO: 366 - DNA, 3369 bp, Adenovirus B3
  MISC_FEATURE (1)..(3369): B3.orf00050 E2B DNA polymerase
atgcaagaagcaacagagccaccgccgtccaaaatgaaaaacaagggcacggtggtagcgcccaagggacacggaaccctgcaagccatcgacatctccaccaacggacccgttgagatcaagtactatctgaacctccctcacgccctccaaaagatcatgcaagttaatctcctgacactgcctactaacctgactccgcagcgtctcaggaccctggacagctccggcctgcgcgctctcgtcctcgagctccgcccctgccgcgccgaggtctggacttgcctcccgcgagggctcgtcagcatgaccaccatcgagacagaagatggtcatgccgatgcagacaacatagtaaagcgcgaggtacaagcgccaggcctcaattttccactgaaatttctcgtcaaaggaagtcaggtacaactcattcataaggtgcatcccgtgaatcgctgcgagtactgcggccgtctgtacaagcacaagcatgaatgctcggcgcgtcgcagggagttctacttccatcacatcaacagccattcctccaactggtggcaggagatccagttcttcccgattggctctcatcctcgcacagaaaggctctttctcacctacgatgtggaaacctacacctggatggggtcctttggcaagcagctaatccccttcatgctggtcatgaaactctctggagaccagcggctcgtcaacatcgcctatgacctcgccataaaactcaagtgggatcgctggcggcaggacccccaaaccttctattgcgtcaccccagaaaagatggcagtcggacagcattttcgtcagtaccgggaccagttacaaacagcactggcagtggacctctggtcctccttccttaaagcgaaccctcacgtgcacgaatgggccctcgaacactatgctctcactgaccctacagatctcacttttgaagaactcaagaagctgcctcatgtcaggggcacccctcgattcttagaactgtacatagtggggcacaacatcaatggctttgatgagatcgtcttggccgctcaggttatcaataaccgagcagaggttcctcagcctttcaaaatcacccgaaatttcatgcccagggccggcaagatcctcttcaatgatgttactttcgctttgcccaaccccgcctacaagaagcgggtggacttccaactctgggaacagggggcctgtgatgacatcgacttcaagtatcaattcctcaaagtcatggtcagggacacttttgccctcactcatacctcgctgcgcaatgcagcccaagcatactctctcccagtggagaagggatgctgtccctacaaggcagtcaatcagttctacatgttgggctcttaccgtgcagaaaaagacgggtttcccctcgaagagtactggaaggatcacgaagaataccttctcaaccgcgagctgtgggaaaagaaaagccaaccgcgttatgacatcatccaggaaactctcgactactgtgccctggatgtactcatcaccgccgagctggtagccaagctgcaagagtcatatgcccacttcataagggactctgtaggcttacctcatgcccattttaacatattccagagacctactatctcttccaattcccatgccatctttcgccagatcgtttacagggcggaaaaacccaaccgcaccaatctgggcccgggtcttcttgccccctcacatgaactctatgactatgtgcgagcaagcatcagaggggggcgatgttatcccacttacatcggcatcctcgaagagcccctctatgtctacgatatctgtggcatgtatgcctccgcgctcacccaccccatgccctggggcacccctcttaacccctatgagcgcgcgctggcagttcgagaatggcagatgaccttggatgatcccgccaccatcagctattttgacaaagatttgctaccgggaatatttaccatagatgcggacccccctgatgagttcatgctagaccccctcccccctttctgttcaagaaaaggaggtcgactctgctggaccaatgagcccctccgaggcgaggtggccaccagtgtggatctgataaccctgcacaataggggatggcgaatcagaatagttccggatgaactgacaaccatctttcctgaatggaaatgtgtggcgcgcgagtacgtccagcttaacatcaccgccaaggagcgcgcggacaaggaaaagaaccaaaccatgcgctccatcgccaagcttctatccaatgccctctatggatcatttgccaccaagctggacaacaagaagattgtgttttctgaccagatggacgagagtcttatgaaaggcatctctgctggtactgtcaatatcaaatcctcctcgttcctagaaactgacaacctgagtgcagaggtcatgcccgccttcgagagggaatacctaccccaacagctggcgctcctggacagcgatccggaagacagtgaggacgaacagaggcccgcccccttttatacccccccggcggggacccctggtcacgtggcctacacttacaagccaatcacattcttggatgtggaggagggggacatgtgtttacataccgtagagaaggtggaccccctggttgacaacgaccgctacccctcccacgtggcctcctttgtgctggcctggacacgcgcttttgtatcagagtgggctgggttcctctacgaagaggaccgaggcactccgctcgaggacaggcccataaagtcggtctacggggacacggacagcctctttgtcacccagcggggacacgaactcatggaaaccaaaggtaagaaacgcatcaaaaaacatggcggaaaacttgtttttgaccccgatgagccggatctgacctggctcgtggagtgcgaaaccgtctgcgcctcctgcggtgcggatgcatactcccccgaatccattttcctcgcgcccaagttgtatgccctcaaatgtatctactgccccgcctgccataaaacttccaaaggtaagctccgtgccaaaggccacgcggccgaggcgctcaactacgaactcatggtaaactgctacctggccgacatgcagggcgccaatcggcagcggttctcgaccagcaggatgagtctgaagcgcaccctcgcaagcgcccaaccaggcgcgcaccccttcaccgtgacggaaacaaccctgactcggacgctgcgaccatggaaggatcggaccctggcagcgctggacgcccatcgtctgattccctactccaggagccgtcccaacccgcgaaacgaggaggtctgctggatcgagatgccatag

SEQ ID NO: 367 - DNA, 1047 bp, Adenovirus B3
  MISC_FEATURE (1)..(1047): B3.orf00051 IVa2 protein IVa2
atgcccatggctgacgggctgaagccgctgaaaaacttctcctcgctccaggagcttctatcccttgggggagagcgcctcctaacggacttggtgcgggaaaatatccatgtaagggaaatgatgaacgaagtggcccccctgctccgggaggacggcagctgtcgttccctaaactaccatctgcaacccgtaattggggtcatttacggtcccactgggtgcggcaagtctcagctgcttaggaatttgctctcgtcccagttaatcaccccggctccagaaacggtattttttatagccccgcaggtggacatgatccccccctctgaactgaaagcctgggaaatgcaaatatgtgagggaaactatgctcccgggccagagggaactttcatcccccaatctggcaccctccgcccaaagtttattaaaatggcttatgatgacctgactcaggagcataactatgatgtttcagacccccggaacgtgttcgcccgtgccgctgcccacggccccatcgctatcattatggatgagtgcatggagaatctggggggtcacaaaggcgtctccaaattttttcatgcttttccctctaagctgcatgataaatttcccaagtgcaccggatacactgtcttggtggtcctgcacaatatgaacccgagacgggatctaggcggcaacattgccaacctcaagatccagtccaaaatgcatataatttcaccccggatgcacccgtcccagctcaacagatttgtaaacacctacactaagggcctccccgttgcaattagtctgctcctaaaagatattgtgcaacaccatgcactccgaccttgctatgactgggtgatttataacactaccccggagcaagaggctcttcaatggagctatctccacccccgagacggactaatgcccatgtatctaaacattcaatcccacctttacagggtactggaaaagatccaccgcgttctcaatgatcgagaccgatggtccagggcataccgcgcgcgaaaaatcaaataa

SEQ ID NO: 368 - DNA, 417 bp, Adenovirus B3
  MISC_FEATURE (1)..(417): B3.orf00053 IX hexon-associated protein IX
atgagtggaagcgcttcttttgaggggggagtatttagcccttatctgacgggcaggctcccaccatgggcaggagttcgtcagaatgtcatgggatccactgtggatgggagacccgtccagcccgccaattcctcaacgctgacctatgccactttgagttcgtcaccattggatgcagctgcagccgccgccgctactgctgccgccaacaccatccttggaatgggctattatggaagcatcgttgccaattccagttcctctaataacccttcaaccctggctgaggacaagctacttgttctcttggcgcagctcgaggccttaacccaacgcttaggcgaactgtctaagcaggtggcccagttgcgtgagcaaactgagtctgctgttgccacagcaaagtctaaataa

SEQ ID NO: 369 - DNA, 1122 bp, Adenovirus B3
  MISC_FEATURE (1)..(1122): B3.orf00054 E1B 55-kDa
atgagccgcaggcgtcctgaaactgtttggtggcatgaggttcagagcgaaggcagggatgaagtttcaatattgcaggagaaatattcactagaacaacttaagacctgttggttggaacctgaggatgattgggaggtggccattaggaattatgctaagatatctctgaggcctgataaacaatatagaattactaagaagattaatattagaaatgcatgctacatatcagggaatggggcagaggttataatagatacacaagataaagcagtttttagatgttgtatgatgggtatgtggccaggggttgtcggcatggaagcagtaacacttatgaatattaggtttaaaggggatgggtataatggcattgtatttatggctaacactaagctgattctacatggttgtagcttttttgggtttaataatacgtgtgtagaagcttgggggcaagttagtgtgaggggttgtagtttttatgcatgctggattgcaacatcaggtagggtcaagagtcagttgtctgtgaagaaatgcatgtttgagagatgtaatcttggcatactgaatgaaggtgaagcaagggtccgccactgcgcagctacagaaactggctgcttcattctaataaagggaaatgccagtgtgaagcataatatgatctgtggacattcggatgagaggccttatcagatgctgacctgcgctggtggacattgcaatattcttgctaccgtgcatatcgtttcacatgcacgcaaaaaatggcctgtatttgaacataatgtgattaccaagtgcaccatgcacataggtggtcgcaggggaatgtttatgccttaccagtgtaacatgaatcatgtgaaggtaatgttggaaccagatgccttttccagagtgagcttaacaggaatctttgatatgaatattcaactatggaagatcctgagatatgatgacactaaaccaagggtgcgcgcatgcgaatgcggaggcaagcatgctagattccagccggtgtgcgtggatgtgactgaagacttgagacccgatcatttggtgcttgcctgcactggagcggagttcggttctagtggtgaagaaactgactaa

SEQ ID NO: 370 - DNA, 537 bp, Adenovirus B3
  MISC_FEATURE (1)..(537): B3.orf00055 E1B 21-kDa
atggaggtttgggctatcttggaagacctcagacagactaagctactgctagaaaacgcctcggacggagtctctggcctttggagattctggttcggtggtgatctagctaggctagtgtttaggataaaacaggactacagggaagaatttgaaaagttattggacgatagtccgggactttttgaagctcttaacttgggtcatcaggctcattttaaggagaaggttttatcagttttagatttttctactcctggtagaactgctgctgctgtagcttttcttacttttatattggataaatggatccgccaaactcacttcagcaagggatacgttttggatttcatagcagcagctttgtggagaacatggaaggctcgcaggatgaggacaatcttagattactggccagtgcagcctctgggagtagcagggatactgagacacccaccgaccatgccagcggttctgcaggaggagcagcaggaggacaatccgagagccggcctggaccctccggtggaggagtag

SEQ ID NO: 371 - DNA, 201 bp, Adenovirus B3
  MISC_FEATURE (1)..(201): B3.orf00056 E1A mRNAII protein
gtgtctgatgatgagtcaccttctcctgattcaactacctcacctcctgaaattcaggcgcccgcacctgcaaacgtatgcaagcccattcctgtgaagcctaagcctgggaaacgccctgctgtggataagcttgaggacttgttggagggtggggatggacctttggaccttagtacccggaaactgccaaggcaatga

SEQ ID NO: 372 - DNA, 594 bp, Artificial Sequence
  B3.orf00058 E1A hypothetical protein
atgagacacctgcgcttcctgccacaggaggttatctccagtgagaccgggatcgaaatactggagtttgtggtaaataccctaatgggagacgacccggaaccgccagtgcagcctttcgatccacctacgctgcacgatctgtatgatttagagatagacgggccggaggatcccaatgaggaagctgtgaatgggttttttactgattctatgctgctagctgctgatgaaggattggacataaaccctcctcctgagacacttgttaccccaggggtggttgtggaaagcggcataggtgggaaaaaattgcctgatctgggagcagctgaaatggacttgcgttgttatgaagagggttttcctcccagtgatgatgaagatggggaaactgagcagtccatccataccgcagtaaatgagggagtaaaagctgccagcgatgtttttaagttggactgtccggagctgcctggacatggctgtaagtcttgtgaatttcacaggaataacactggaatgaaagaactattgtgctcgctttgctatatgagaatgcactgccactttatttacagtaagtgtatttaa

SEQ ID NO: 373 - DNA, 378 bp, Adenovirus B7
  MISC_FEATURE (1)..(378): B7.orf00001 E4 ORF1 protein
atggctgatgaggctttgtatgtgtatttagagggaccaggggcgatgttgcctgaacagcagcagagaaataattatattttttattctcctgtgccttttactttgtatccgcgaggggtggctttgctaaacttaaaattaagcataattatacccagaggctatgttggctgttttttctctttaactgatgctaacatgtctggattatatgcttcatcaagaattattcatgctggccaccgcgaggaactttcggtgctgttgtttaatcacgatgacaggttttacgagggtcgagctggagaccctgtggcttgtcttgtgatggaaagactgatttatccacctgttcgacaggctactatgatatga

SEQ ID NO: 374 - DNA, 435 bp, Adenovirus B7
  MISC_FEATURE (1)..(435): B7.orf00002 E4 130aa protein
atgacgtttgtttcttttattttacagactaattcaaaactaacaatgttggagcgcagcgcggtaacctattgcatttgcatcccagaggttttgaatgtttttttggaaaatttttcttttattcaatttttacaagaaactctgcctgattatatttccagcaactttgatgatattactggtggttcccagtatgcttattctaatcttgtttttgctggagccaattggggaggtctgcgcttgtactgcactgtagcgtcccctgctattgttcccggggggcttctggctaagcagtttggtgataatatgagagagtatttacaactagaacttagagaagaacttagagccaagggcatatcaattgatgatgccattcttaatttgctacaggtgacacaggagcaagatattttgtcattatga

SEQ ID NO: 375 - DNA, 354 bp, Adenovirus B7
  MISC_FEATURE (1)..(354): B7.orf00003 E4 ORF3 protein
atgagggtgtgtttaagaatggtggtggagggcgcccttcgggacctgtttgtaatgtgtggtttggatttaccacaagaactgacacgaataattcaaggttggaaagctgaaaattatctgggaatggtgcaagaatgtaatatgatgtttgaggagttagaaaatgctccttcttttggtattcttttgtttttggatgtgcgcgtggaggctttgttggaagccaccgttgagcaccttgaaaatcgcatttcttttgatttagctgtgctttttcaccaacacagtgggggcgatagatgccatctgcgcgatctacaatttgaagtactgcgagatcgtttggaataa

SEQ ID NO: 376 - DNA, 900 bp, Adenovirus B7
  MISC_FEATURE (1)..(900): B7.orf00006 E4 ORF6 34-kDa
atgtcaggaagcaactccattatgacaaggttgcgcgcgcgctcgacatcttgcgccagacatcacccttacaccagagcccagttaccacgatgtgaggaaaatgaaacccgagcttctatgactgaagaccacccgctgttgccagattgtgatactatgactatgcatagtgtaagttgtgttcgtggtcttccttgttctgccagctttactgttctgcaagagtttcccattccttgggatatgtttctaaatcccgaggagttaagaattatgagaagatgcatgcatttatgtctttgttgtgctactatagatatttttcattctcaagtgattcatggtcgagaaaattgggttcttcattgtcattgtaatcggcagggttcacttcaatgcatggctgggggagcggtgttggcagtgtggtttcggaaggttatattgggttgcatgattaaccaacgttgtccatggtacagacagattgttaatatgcacatgccaaaagagattatgtatgtgggtagtgtgtttttgagggaacgacatttaatttatattaaaatttggtatgatggtcatgcaggggcgattatatctgatatgagttttggctggagcgcttttaattatggtttattaaacaatattgtgataatgtgctgtacctactgtagtaatctaagtgaaatcagaatgcgttgctgcgcgcaccgcaccagaaagttaatgttaagggctattaaaatcatgcttcaggacactgtggatcccgatcctataagcagcagtcgcacggagcgacgcagacagcggctgcttgtgggtttgatgagacacaatcgcccgattccgttttcggattatgattcccatcgttcttcttccagatga

SEQ ID NO: 377 - DNA, 252 bp, Adenovirus B7
  MISC_FEATURE (1)..(252): B7.orf00007 E4
atgaccgtgatccagaccccggagtcgcatccgcagcagttggactgtgaaagcgctttaaaagactatcccgatgcatttttatgtatcactgaccccagattggctcgctttgaaactgtttggaatgtggaatctaaaactatgtctatctgtaatggtatccaaatgtttaaagctgtgcgtggggagagattggtgtattctgttaaatgggaagggggaggcaaaataactactcgaattttatga

SEQ ID NO: 378 - DNA, 978 bp, Adenovirus B7; identical to SEQ ID NO: 133
  MISC_FEATURE (1)..(978): B7.orf00008 L5 fiber protein

SEQ ID NO: 379 - DNA, 165 bp, Adenovirus B7
  MISC_FEATURE (1)..(165): B7.orf00009 U protein
atgaagattgtgggtacaggagaggagttaaaatttgacatcccctttaaagtatggagaaagtatgccgctgaacggggtttagaataccagagttgggaagagggaagtgaggtgctgctgggagaaaatttcaacagagaccttattgctgatttcaagtaa

SEQ ID NO: 380 - DNA, 408 bp, Adenovirus B7
  MISC_FEATURE (1)..(408): B7.orf00011 E3 15.3 kDa protein
atgactgaaatactcaccacctccaattccgccgaggatctgcttgatatggacggccgcgtctcagaacagcgactcgcccaactacgcatccgccagcagcaggaacgcgtgaccaaagagctcagagatgtcatccaaattcaccaatgcaaaaaaggcatattttgcttggtaaaacaagccaaaatatcctacgagatcaccgctactgaccatcgcctctcttacgaacttggcccccaacgacaaaaatttacatgcatggtgggaatcaaccctatagttatcactcagcaaagtggagatactaaggggtgcattcactgctcttgtgattccatcgagtgcacctacaccctgctaaagaccctatgcggcttaagagacctgctacccatgaattaa

SEQ ID NO: 381 - DNA, 405 bp, Adenovirus B7
  MISC_FEATURE (1)..(405): B7.orf00012 E3 14.9 kDa protein
atgcaggctatgctaccagtcattttaattctgctactaccctgcattgccctagcttccaccgccactcgcgctacacctgaacaacttagaaaatgcaaatttcaacaaccatggtcatttcttgattgctaccatgaaaaatctgatttccccacatactggatagtgattgttggaataattaacatactttcatgtacatttttctcaatcacaatataccccacatttaattttgggtggaattctcccaatgcactgggttacccacaagaaccagatgaacatattccactacaacacatacaacaaccactagcactggtagagtatgaaaatgagccacaaccttcactgcctcctgccattagttacttcaacctaaccggcggagatgactga

SEQ ID NO: 382 - DNA, 276 bp, Adenovirus B7
  MISC_FEATURE (1)..(276): B7.orf00013 E3 10.3 kDa protein
atgatccctagaaatttcttcttcaccatactcatctgtgctttcaatgtctgtgctactttcacagcagtagccactgcaagcccagactgtataggaccatttgcttcctatgcactttttgccttcgttacttgcatctgcgtgtgtagcatagtctgcctggttattaattttttccaactggtagactggatctttgtacgaattgcctacctacgtcaccatcccgaataccgcaatcaaaatgttgcggcacttcttaggcttatttaa

SEQ ID NO: 383 - DNA, 201 bp, Adenovirus B7
  MISC_FEATURE (1)..(201): B7.orf00016 E3 7.7 kDa protein
atgatattgtttcaatcaaataccactaacactatcaatgtgcagactactttaaatcatgacatggaaaaccacactacctcctatgcatacataaacattcagcctaaatacgctatgcatctaaaaatcaccatactaattgtaattggaattcttatactatctgttattctttattttctattctcctatgattag

SEQ ID NO: 384 - DNA, 570 bp, Adenovirus B7
  MISC_FEATURE (1)..(570): B7.orf00018 E3 20.3 kDa protein
atgatttccactacaatttttatcattactagccttgcggctgtaacttatggccgttcacacctaactgtacctgttggctcaacatgtacactacaaggaccccaacaaggctatgtcacttggtggagaatatatgataatggagggttcgctagaccatgtgatcagcctggtacaaaattttcatgcaacggaagagacttaaccataattaacataacatcaaatgagcaaggcttctattatggaaccaactataaagatagtttagattacaacattattgtagtgccagccaccacttctgctccccgcaaaaccactttctctagcagcagtgccaaagcaagcacaattcctaaaacagcttctgctatgttaaagcttcaaaaaatcgctttaagtaattccacagccgctcccaaaacaattcctaaatcaacaattggcatcattactgccgtggtagtgggattaattattatatttttgtgcataatgtactatgcctgctgctatagaaaacatgaacaaaaaggtgatgcattactaaattttgacatttaa

SEQ ID NO: 385 - DNA, 540 bp, Adenovirus B7
  MISC_FEATURE (1)..(540): B7.orf00019 E3 20.1 kDa protein
atggctactgttacagctctaattattgccagcattgtcactgtcgctcacgggcaaacaattgtccatattaccttaggacataatcacacccttgtagggcccccaattacttcagaggttatttggaccaaacttggaagtgttgattattttgatataatttgcaacaaaactaaaccaatatttgtaatctgtaacagacaaaatctcacgttaattaatgttagcaaaatttataacggttactattatggttatgacagatccagtagtcaatataaaaattacttagttcgcataactcagcccaaatcaacagtgccaactatgacaataattaaaatggctaataaagcattagaaaattttacatcaccaacaacgcccaatgaaaaaaacattccaaattcaatgattgcaattattgcggcggtggcattgggaatggcactaataataatatgcatgttcctatatgcttgttgctataaaaagtttcaacataaacaggatccactactaaattttaacatttaa

SEQ ID NO: 386 - DNA, 519 bp, Adenovirus B7
  MISC_FEATURE (1)..(519): B7.orf00020 E3 19 kDa MHC class I antigen-binding glycoprotein
atgggggccatattagtcgtgcttgctttactttcgcttttgggtctgggctctgctaatctcaatcctcttgatcacgatccatgtctagacttcgacccagaaaactgcacacttacttttgcacccgacacaagccgtctctgtggagttcttattaagtgcggatgggactgcaggtccgttgaaattacacataataacaaaacatggaacaataccttatccaccacatgggagccaggagttcccgagtggtatactgtctctgtccgaggtcctgacggttccatccgcattagtaacaacacttttattttttctgaaatgtgcgatctggccatgttcatgagcagacagtatgacctatggcctcccagcaaagagaacattgtggcattttctattgcttattgcttggtaacatgcattatcactgctatcatttgtgtgtgcatacacttgcttatagttattcgccctagacaaagcaataaggaaaaagagaaaatgccttaa

SEQ ID NO: 387 - DNA, 441 bp, Adenovirus B7
  MISC_FEATURE (1)..(441): B7.orf00022 E3 16.1 kDa protein
atgaaagcctttgctgtcttgtttgtgctgagtttaataaaaactgagttaagaccctcctacggactaccgcttcttcaatcaggactttacaacaccaaccagatcttccagaagacccagacccttcctcctctgatccaggactctaactctaccttaccagcaccatccactactaaccttcccgaaactaacaagcttggatctcatctgcaacaccgcctttcacgaagccttctttctgccaatactaccactcccaaaaccggaggtgagctccgcggtctccctactgacgacccctgggtggtagcgggttttgtaacgttaggagtagttgcgggtgggcttgtgttaatcctttgctacctatacacaccttgctgtgcatatttagtcatattgcgctgttggtttaaaaaatgggggccatattag

SEQ ID NO: 388 - DNA, 321 bp, Adenovirus B7
  MISC_FEATURE (1)..(321): B7.orf00023 E3 12.1 kDa glycoprotein
atgtctaatggtggcgcggctgagctagctcgactgcgacacctagaccactgccgccgctttcgctgcttcgcccgggaactcaccgagttcatctacttcgaactccccgaggagcaccctcagggtccggcccacggagtgcggattaccatcgaagggggaatagactctcgcctgcatcgaatattctcccagcgacccgtgctgattgagcgcgaccagggaaatacaaccatctccatctactgcatctgtaaccaccccggattgcatgaaagcctttgctgtcttgtttgtgctgagtttaataaaaactga

SEQ ID NO: 389 - DNA, 684 bp, Adenovirus B7
  MISC_FEATURE (1)..(684): B7.orf00024 L4 protein VIII
atgagtaaagagattcccacgccttacatgtggagctatcagccccaaatggggttggcagcaggcgcctcccaggactactccacccgcatgaattggcttagcgccgggccctcaatgatatcacgggttaatgatatacgagcttatcgaaaccagttactcctagaacagtcagctctcaccaccacaccccgccaacaccttaatccccgaaattggcccgccgccctggtgtatcaggaaactcccgctcccaccaccgtactacttcctcgagacgcccaggccgaagttcatatgactaacgcaggtgtacagctggcgggcggttccgccctatgtcgtcaccgacctcaacagagtataaaacgcctggtgatcagaggccgaggtatccagctcaacgacgagtcggttagctcttcgcttggtctgcgaccagacggagtcttccaaatcgccggctgtggaagatcttccttcacccctcgtcaggctgtactgactttggagagttcgtcctcgcagccccgctcgggcggcatcggaactctccagtttgtggaggagtttactccctctgtctacttcaaccccttctccggctctcctggccagtacccggacgagttcataccgaacttcgacgcaatcagcgagtcagtggatggctatgattga

SEQ ID NO: 390 - DNA, 297 bp, Adenovirus B7
  MISC_FEATURE (1)..(297): B7.orf00025 L4 33 kDa protein
gtgaccagaaaaccagcagttagaaaatccacaacaagtgcagcaggaggaggactgaggatcacagcgaacgagccagcgcagaccagagagctgaggaaccggatctttccaaccctctatgccatcttccagcagagtcgggggcaagagcaggaactgaaagtaaaaaaccgatctctgcgctcgctcaccagaagttgtttgtatcacaagagcgaagaccaacttcagcgcactctcgaggacgccgaggctctcttcaacaagtactgcgcgctgactcttaaagagtag

SEQ ID NO: 391 - DNA, 2487 bp, Adenovirus B7
  MISC_FEATURE (1)..(2487): B7.orf00028 L4 100 kDa hexon-assembly associated protein
atggaaactcagccatcactgccaacatcgctgcaagcgccatcacacctcgcccccagcagcgacgaggaggaaagcttaaccaccccaccacccagtcccgctaccaccacctctaccctcgatgatgaggaggaggtcgacgcagcccaggagatgcaggcgcaggataatgtgaaagcggaagagattgaggcagatgtcgagcaggacccgggctatgtgacaccggcggagcacgaggaggagctgaaacgttttctagacagagaggatgacgaccgcccagagcatcaagcagatggcgatcaccaggaggctggcatcggggatcatgttgccgactacctcaccgggcttgggggggaggacgtgctcctcaaacatctagcaaggcagtcgaacatagttaaagacgcactactcgacctcaccgaagtgcccatcagtgtggaagagcttagccgcgcctacgagctgaacctcttttcgcctcagataccccccaagcggcagccaaacggcacctgcgaggccaaccctcgactgaacttctatccggcttttactgtccccgaagtgctggccacctaccacatcttttttaagaaccaaaagattccagtctcctgccgcgccaaccgcacccgcgccgatgcccttctcaacttgggtccgggagctcgcttacctgatatagcttccttggaagaggttccaaaaatctttgagggtctgggaagtgatgagactcgggccgcaaatgctctgcaacagggagagaatggcatggataaacatcacagcgctctagtggaactggagggtgacaatgcccggcttgcagtgctcaagcgcagtatcgtggtcacccattttgcctaccccgctgttaacctgccacccaaagtcatgagcgctgtcatggaccatctgctcatcaaacgagcaagtccactttcagaaaaccagaacatgcaggatccagacgcctcggacgatggcaagccggtagtcagtgacgagcagctatctcgctggctgggtaccaactccccccgagatttggaagaaaggcgcaagcttatgatggctgtagtgctagtaactgttgagctggagtgtctgcgccgcttttttaccgaccccgagaccctgcgcaaactagaggagaacctgcactacaccttcagacatggcttcgtgcgccaggcatgcaagatttccaacgtggagctcaccaacctggtttcatacatgggcattttgcatgagaaccggctagggcagagcgttctgcacaccaccctgaagggggaggcccgccgcgactacatccgagactgtgtctacctctacctctgccatacctggcagactggtatgggtgtgtggcaacagtgtttggaagagcagaacctcaaagaactggacaagctcttgcagagatcccttaaagccctgtggacaggttttgacgagcgcaccgtcgcctcggacctggcggacatcatcttccccgagcgtcttagggttactctgcgaaacggcctgccagacttcatgagccagagcatgcttaacaactttcgctctttcatcctggaacgctccggtatcctgcctgtcacctgttgtgcgctgccctccgactttgtgcctcttacctaccgcgaatgcccaccgccgctatggagccactgctacctgttccgcctggccaactacctctcctaccactcggatgtgatagaggatgtgagcggagacggcctgctggaatgccactgccgatgcaatttatgcacaccccaccgctccctcgtctgcaacccacagttgctaagcgagacccagatcatcggcaccttcgagttgcagggtcccaacagtgaaggcgaggggtcttctccgggtcatagtctgaaactgacaccggggctgtggacctccgcctacctgcgcaagtttcatcccgaggactaccacccctatgagatcaggttctatgaggaccagacacatcctcccaaagtcgagctctcagcctgcgtcattacccagggagcaattctggcccaattgcaagccatccaaaaatcccgccaagaatttctgctaaaaaagggaagcggggtctaccttgacccccagaccggtgaggagctcaacacaagattcccccaggatgtcccatcgccgaggaagcaagaagctgaaggtgcagctgtcgcccccagaggatatgaaggaacactgggacagtcaggcagaggaggagatggaagattgggacagccaggcagaggaggtggacagcctggaggaagacagtttggaggaggaagacgaggaggcagaggaggtggaagaagcaaccgccgccaaacagttgtcatcggcggcggagacaagcaagtccccagacagcagcacggctaccatctccgctccgggtcggggagcccagcggcggcccaacagtag

SEQ ID NO: 392 - DNA, 1554 bp, Adenovirus B7
  MISC_FEATURE (1)..(1554): B7.orf00032 E2A DNA binding protein
atggccagccgcggaggaaatcagtcaagcgaccgccaacgggagcacacccccgaacgcggaatgggctctgccagccatccgcctccaaggccagaccgcagcccatctcagtcacctccacctctgcccccgaagaggaacacctaccgtcgcgtggggtccaattcttctatcgagagccaggtggtactggtaagcgaaacttcgcggtcatccctgtctccggaacggagcaacagtcctcccccaatccctcccaagaagaagcccaggaagaccaagcatgtccctctgcaagacatcagccaggacagcgaagaagaaagagaacaggttcagttggtggccgtgggcttcagctaccccccggtgcgcatcattgagaaggatggcaagaggagtgttgagaagatcgacaataatgatcctatatctaaaggagctacttctattgctgttaggaatcctttgagcttgcccctggtatctgcctgggagaagggcatggaagtgatggctgtgctaatggagaggtacaggctggataatgacctgagaacctctttcaagctgatgccagagcagcacgagcagtacaagcgtatctgccaccagtatgtgaacgaggagcaccgcggcatcccgctgacatttagtagcatgaagaccctgacagcgatgatgggaagattcatgcagggattggtgcattcttattctgagatcgcccacaataattgggagtgcaccgggtgcgctctgtgggctcatggatgcaccgattacgaaggcaaggtgaaatgcctgcatggcactatcatgatccagaaggaccacattatcgagatggatgtggcgagcgagaacgggcagcgcgctatgaaggagaacccagacagagccaagatcacccagaaccgctggggcagaaatgtggtccagttggccaacaacgatgcccgctgctgtgtgaatgatgccaactgtgctactaaccaattttccagcaagtcctgtgggatgttctacaccgagggaattaaggctcaggaagctttcaagcagtacgaagccttcatgaaggccgtgtacccagggataacccccgaccaagccaggatgatgctgatccccattcattgcgattgcaaccacaagccaggctgtgctcccgtgatgggcaggcagacctgtaagatgaccccctttgggatggccaatgctgaagacttggatgtggctaccatcagtgacccgaccgtgctggcaagcgtgagacacccagccttgatggtgttccagtgttgcaacccagtgtaccgaaactcccgtgtccaaaatgccggccccaactgtgatttcaagatctctgctcctgacctgcttggcgccctgcaactgaccagaaagttgtggcaagacacctttcccgagattccagttcccaagctggtgatacccgagttcaagtggcagaacaggttacagttccgcaacgtatccctgcccgcgggtcactatgactcccgccagaatccatttgacttctga

SEQ ID NO: 393 - DNA, 630 bp, Adenovirus B7
  MISC_FEATURE (1)..(630): B7.orf00033 L3 23 kDa protein
atgacatgcgggtccggaaacggctccagcgagcaagagctcaaagccatcgtccgagacctgggctgcggaccctatttcctgggaacctttgacaagcgtttcccggggttcatggcccccgacaagctcgcctgtgccatagtcaacactgccggacgcgagacggggggagagcactggctggcttttggttggaacccgcgctccaacacctgctacctttttgatccttttgggttctcggatgagcggctcaaacagatttaccagtttgagtacgaggggctcctgcgccgcagtgcccttgctaccaaaaaccgctgcatcaccctggagaagtccacccaaagcgtgcagggtccgcgctcagccgcctgtggacttttttgctgtatgttccttcatgcctttgtgcactggcccgaccgccccatggacggaaaccccaccatgaagttgctgactggggtgtccaacagcatgctccaatcaccccaagtccagcccaccctgcgccgcaaccaggaggcgctatatcgcttcctaaacacccactcatcttactttcgttctcaccgcgcgcgcatcgaaagggccaccgcgtttgaccgtatgaatatgcaataa

SEQ ID NO: 394 - DNA, 2814 bp, Adenovirus B7; identical to SEQ ID NO: 193
  MISC_FEATURE (1)..(2814): B7.orf00036 L3 hexon protein

SEQ ID NO: 395 - DNA, 138 bp, Adenovirus B7
  MISC_FEATURE (1)..(138): B7.orf00037 L3 hexon
atgtgcatgtatgcccattggggcatcatcgatggggtggccatcttgaaagcaactcagcctcggcgcgcgacctcttcctttctcctctgctgcggcggcgtggtgatgatacatacacacagacaagcaagttaa

SEQ ID NO: 396 - DNA, 753 bp, Adenovirus B7
  MISC_FEATURE (1)..(753): B7.orf00038 L3 protein pVI
atggaagacatcaatttttcatccctggctccgcgacacggcacgaggccgtacatgggcacctggagcgacatcggcacgagccaactgaacgggggcgccttcaattggagcagtatctggagcgggcttaaaaattttggctcgaccgtaaaaacctatgggaacaaagcttggaacagcagcacagggcaggctctgagaaataagcttaaggaacaaaacttccaacagaaggtggtcgatgggatcgcctctggtattaacggcgtagtggatctggccaaccaggctgtacaaaaacagataaacagccgactggacccgccgcccgcaacccctggtgaaatggaagtggaggaagagcttcctccgctggaaaagcggggcgacaagcgtccgcgacccgagctggagcagacgctggtgacgcgcgcagacgagcccccttcatacgaggaggcagtaaagctaggaatgcccactactaggcccgtagctcacatggctaccggggtgatgaaaccttctcagtcacatcgacccgccaccttggacttgcctcctccccctgcttctgcggcgcttgttcccaaacctgtcgctaccagaaagcccaccgccgtacagcccgtcgccgtagccagaccgcgtcctgggggcacaccgcgcccgaaagcaaactggcaaagtactctgaacagcatcgtgggtctgggcgtgcagagtgtaaagcgccgtcgctgctattaa

SEQ ID NO: 397 - DNA, 228 bp, Adenovirus B7
  MISC_FEATURE (1)..(228): B7.orf00039 L2 protein pX
atggccctcacttgccgccttcgcgtccccattactggctaccgaggaagaaactcgcgccgtagaaggatgttggggcgagggatgcgccgccacagacgaaggcgcgctatcagcagacgattagatggtggctttttgccagctcttatacccatcatcgccgcagcgatcggggcgataccaggcatagcttccgtggcggttcaggcctcgcagcgccactaa

SEQ ID NO: 398 - DNA, 1053 bp, Adenovirus B7
  MISC_FEATURE (1)..(1053): B7.orf00041 L2 protein pV
atgtccaagcgcaaatacaaggaagagatgctccaggtcatcgcgcctgaaatctacggtccaccggtgaaggatgaaaaaaagccccgcaaaatcaagcgggtcaaaaataacaaaaaggaagaagatgacgctgatgggctggtggagtttgtgcgcgagttcgccccaagacggcgcgtgcagtggcgcgggcgcaaagtgcgtcaagtgctcagacccgggaccactgtggtctttacacctggcgagcgttccagcactacttttaaacggtcctatgatgaggtgtacggggatgacgatattcttgagcaggcggcagaccgccttgacgagtttgcttatggcaagcgcactagatccagtcccaaagaggaggcggtgtccattcccttggatcatggaaatcccacccccagcctcaaaccagtcaccctgcagcaagtgctgcccgtgcctgcgcggagaggcgtaaagcgcgagggtgaggacctatatcccaccatgcagctaatggtgcccaagcgccagaggctagaagacgtactggagaaaatgaaagtggatgccgatatccagcctgaggttaaagtaagacctattaaggaagtggcgccaggtttgggagtacaaaccttcgacatcaagattcccaccgagtccatggaagtgcagaccgaacctgcaaaacccacaaccacctcaattgaggtgcaaacggaaccctggatgcccgcgcccgttgccgcccccagcaccactcgaagatcacgacgaaagtacggcccagcaagtctgctaatgcccaactatgctctgcacccatccatcattcccactccgggttacagaggcactcgctactatcgaaaccggagcaacacctctcgccgccgcaaaccacctgcaagtcgcactcgccgtcgccgccgccgcaacactgccagcaaattgactcccgccgccctggtgcggagagtgtaccgcgatggtcgcgctgaacctctgacgctgccgcgcgcgcgctaccatccaagcatcaccacttaa

SEQ ID NO: 399 - DNA, 579 bp, Adenovirus B7
  MISC_FEATURE (1)..(579): B7.orf00042 L2 major core protein  pVII
atgtccattctcatctcgcccagtaataataccggttggggactgtatgcgcccaccaagatgtatggaggcgcccgcatacgctctacccagcaccctgtgcgcgttcgcggtcatttccgcgctccatggggcgcactcaagggtcgtacccgcactcggaccacggtcgatgatgtgatcgaccaggtggtcgccgatgctcgtaattatactcctactgcgcctacatctactgtggatgcagttattgacagtgtggtggcagacgcccgcgcctatgctcgccggaagagccgaaggaggcgcattgctaggcgccacagggctactaccgccatgcgagctgcaaaagctattctgcggagggccaaacgtgtggggcgaagagccatgcttagagcggccagacgcgcggcttcaggtgccagcagcggcaggtcccgcaggcgcgcggccacggcggcagcagcggccattgccaacatggcccaaccgcgaagaggcaatgtgtactgggtgcgtgatgccactaccggccagcgcgtgcccgtgcgcacccgcccccctcgcacttag

SEQ ID NO: 400 - DNA, 1563 bp, Adenovirus B7; identical to SEQ ID NO: 165
  MISC_FEATURE (1)..(1563): B7.orf00043 L2 penton protein

SEQ ID NO: 401 - DNA, 1767 bp, Adenovirus B7
  MISC_FEATURE (1)..(1767): B7.orf00044 L1 hprotein IIIa
atggaacagcagcaggcaccggaccccgcaatgcgggcggcgctgcagagccagccgtccggcattaactcctcggacgattggacccaggccatgcaacgcataatggcgctgacgacccgcaaccccgaagcctttagacagcaaccccaggccaaccgcctttcggccatactggaggccgtagtgccctcccgctccaaccccacccacgagaaggtcctggctatcgtgaacgcgctggtggagaacaaggccatccgtcccgatgaggccgggctggtatacaatgctctcttggagcgcgtggcccgttacaacagcagcaacgtgcaaaccaacctggaccggatggtgaccgatgtgcgcgaggccgtgtctcagcgcgagcggttccagcgcgacgccaacttggggtcgttggtagcgctaaacgcttttctcagcacccagcccgccaacgtgccccgtggtcagcaagactatacaaactttttgagtgcattgagactcatggtagctgaggtgccccagagcgaggtgtaccagtccgggccagattacttcttccagaccagcagacagggcttgcagacagtgaacctgactcaggctttcaaaaacctgaagggtctctggggagtgcacgccccagtaggggatcgcgcgaccgtgtctagcttgctgactcccaactcccgcctgctgctgctgctggtatccccctttactgacagcggtagcatcgaccgcaactcctacttgggctacctgcttaacctgtatcgcgaggccataggacagagccaggtggacgaacagacctatcaagaaatcacccaagtgagccgcgccctgggtcaggaagacacgggcagtttggaagccaccctgaacttcttgttaaccaaccggtcgcagaagatccctcctcagtatgcgcttaccgctgaggaggagcggatccttagatacgtgcaacagagcgttggattgttcctgatgcaggagggggcgacacctaccgccgcgctggacatgacagctcgaaacatggagcccagcatgtatgctagtaacaggcctttcattaacaaactgctggactacctgcacagggcggccgccatgaactctgattatttcaccaatgctatcctgaacccacactggctgcccccacctggtttctacactggcgagtacgacatgcccgaccccaatgacgggttcctgtgggacgatgtagacagcagcatattctccccgcctcccggttatacagtttggaagaaggaagggggcgatacaaggcactcttccgtgtcgctgtccagaacggctggtgctgccgcgaccgtgcccgaagctgcaagtcctttccctagcttgcccttttcactaaacagcgttcgcagcagtgaacttgggagaataacccgcccgcgcttgatgggcgaggatgagtacttgaatgactctttgttgaggccagagagggaaaagaacttccccaacaatggaatagagagcctggtggataagatgagtagatggaagacctatgcgcaggatcacagagacgagcccaaaatcttgggggctacaagcagaccgacccgtagacgccagcgccacgacaggcagatgggtcttgtgtgggacgatgaggactctgccgatgatagcagcgtgttggacttgggtggaagaggagggggcaacccgttcgctcatctgcgtcccagattcgggcgcatgttgtaa

SEQ ID NO: 402 - DNA, 1158 bp, Adenovirus B7
  MISC_FEATURE (1)..(1158): B7.orf00045 L1 52/55-kDa protein
atgcatccagtgctgcgacagatgcgcccccagcaacaggccccttctcagcaacagccacaaaaggctcttcttgctcctgcaactactgcagctgcagccgtgagcggcgcgggacagcccgcctatgatctggacttggaagagggcgagggattggcgcgcctgggggctccatcgcccgagcggcacccgcgggtgcaactaaaaaaggactctcgcgaggcatacgtgccccagcagaacctgtttagggacaggagcggcgaggagccagaggagatgcgagcatctcgatttaacgcgggtcgcgagctgcgccacggtctggatcgaagacgggtgctgcaagacgaggattttgaggtcgatgaagtcacagggatcagcccagctagggcacatgtggccgcggccaacctagtctcggcctacgagcagaccgtgaaggaggagcgcaacttccaaaaatcttttaacaaccatgtgcgcaccctgattgcccgcgaggaagtgaccctgggtctgatgcatctgtgggacctgatggaggctatcgcccaaaaccccactagcaaaccactgacagctcagctgtttctggtggttcaacatagcagggacaacgaggcattcagggaggcgttgttgaacatcaccgagcctgatgggagatggctgtatgatctgatcaacatcctgcaaagtattatagtgcaggaacgtagcctgggtttggctgagaaagtggcagctatcaactactcggtcttgagcctgggcaaatactacgctcgcaagatctacaagaccccctacgtacccatagacaaggaggtgaagatagatgggttttacatgcgcatgactctaaaggtactaactctaagcgacgatctgggggtgtatcgcaatgacaggatgcatcgcgcggtgagcgccagtaggaggcgcgagctgagcgacagagaacttatgcacagcttgcaaagagctctaacgggggccgggactgatggggagaactactttgacatgggagcggacttgcaatggcaacccagtcgcagggccatggaggctgcagggtgtgagcttccttacatagaagaggtggatgaagtcgaggacgaggagggcgagtacttggaagactga

SEQ ID NO: 403 - DNA, 1923 bp, Adenovirus B7
  MISC_FEATURE (1)..(1923): B7.orf00047 E2B pTP
atgaactacttcatgccgctgcgcaacatctggaaccgcgtgcgcgagttcccacgtgcatccaccaccgcctccggtatcacctggatgtccaggtacatctacggctaccaccgcctcatgctggaagacctcgcccccggagccccggctacagagcgatggcccctgtaccgccagccatcgccacactttctcatcggctaccagtacctggtgcgcacctgcaacgattacatctttgacacgcgcgcatactcgcgcctgaagtacaccgagctcgtgcgccctgggcaccagacagtcaactggtcagtcatggccaactgctcctacacaatcaacaccggggcctaccaccgcttcgtggactttgacgactttcaagccaccctcacccaggtgcagcaagccatcctcgccgaaagggttgtagcggatctggcacttgtccagcccatgcgcgggttcgggatcactcgcatgcatggcagggcgggcgaagaagaagtgcccgtggaacgactcatgcaagactactataaagatctggccagatgtcaggataatgcttggggaatggctcatcgcctgcgcatccaacaagccggacccaaagacctggtgctcctcgccaccatccgccgtcttaaaactgcctattttaatttcatcaccagcagcatcgtctcaccctcgcaagaggaggaaggagaagaaagagagaaccccgaccgagcgtctagccgcccccgcccgcaagaaacagtgctcagcctaccttgcgattgcgactggttagacgctttcgtcgaaaggttttcagatcccgtggatcttgagacaatcaggtccttgcgcggagtacctacggggcaattgataaaatgcataatcagcgcggtgtccctgcccaacggagagcctcccagtcaccacttcagggagatgcgcggaggcgtcttcactctgagacccagggagaacggtcgtgccgtcaccgagactatgcgccgccgccgcggagaggtcattgaaagattcatcgaccgtctgcccgtgcgccgccggcgtcgccgcgttccccctcctcctgcagccccacctgaagaggaagagatgttagtggaagaagaagagattgaggaagaaatcctaggagctttcgagcgcgaggtgcgcaccaccatcgccgaacttatccgtcttctggaagaggagttgaccgtgtccgcgcgtaactcccagtttttcaactttgccgtggacttctacgaggccatggagcgcttggaagcgctgggcgatgtcagcgagatgccgctgagacgatggatcatgtatttcttcgtcaccgagcacatcgccaccacactcaactaccttttccagcgcctatgcaactatgcggtcttcacccgccacgtggagctcaacctcgcccaggtggtcatgcgcgcgagagatcccgtgggggctgtggtctacagccgcgtctggaacgaggcgggcatgaatgctttctctcaactcattgggcgcatctccaacgacctcgcggccaccgtcgagagagcgggccgcggagatcttcaagaggaagagatcgagcagttcatggccgagatcgcctaccaggacaactctggcgacgtgcaagaaatccttaggcaagccgccgtcaacgataccgagattgattctgttgaactctctttcaggttcaagctcacggggccggtagctttcacccagaggcgtcagatccaggatgtcaaccgccgcgtcgtcgcgcatgcgagtcttctcagggcgcagtaccagaacctacccgcgcgcggtgccgacgtaccactgccagccatgccgccgggtcccgagccgcccctgccgcccggtgcgcgccctcgacaccgcttctaa

SEQ ID NO: 404 - DNA, 3369 bp, Adenovirus B7
  MISC_FEATURE (1)..(3369): B7.orf00048 E2B DNA polymerase
atgcaagaagcaacagagccaccgccgcccaaaaggaaaaacaagggcacggtggtagcgcccaaggggcacggaaccctgcaagccatcgacatctccaccaacggacccgtggagatcaagtaccatctgaacctccctcacgccctcgaaaagatcatgcaagtcaatctcctgacactgcctactaacctgactccgcagcgtctcaggaccctggacagctccggcctgcgcgctctcgtcctcgagctccgcccctgccgcgccgaggtctggacttgcctcccgcgagggctcgtcagcatgaccaccatcgagacagaagatggtcatgccgatgcagacaacatagtagagcgcgaggtacaagcgccaggcctcaattttccactgaaatttctcgtcaaaggaagtcaggtacaactcattcatgaggtgcatcccgtgaatcgctgcgagtactgcggccgtctgtacaagcacaagcatgaatgctcggcgcgtcgcagggagttctacttccatcacatcaacagccattcctccaactggtggcaggaaatccagttcttcccgattggctctcatcctcgcacagaaaggctcttcctcacctacgatgtggaaacctacacctggatggggtcctttggcaagcagctaatccccttcatgctggtcatgaaactctctggagaccagcggctcgttaacatcgcctatgacatcgccatgaaactcaagtgggatcgctggcggcaggacccccaaaccttctattgcatcaccccagaaaagatggcagtcggacagcattttcgtcagtaccgggaccagttacaaacagcactggcagtggacctctggtcctccttcctcaaagcgaaccctcacatgcacgaatgggccctcgaacactatgctctcactgaccctacagatctcacttttgaagaactcaagaagctgcctcatgtcaggggcacccctcgattcttagaactgtacatagtggggcacaacatcaatggctttgatgagatcgtcttggccgctcaggttatcaataaccgagcagaggtccctcagccttttaaaatcacccgaaatttcatgcccagggccggcaagatcctcttcaatgatgttactttcgctttgcccaatcccgcctacaagaagcgggcggacttccaactctgggaacagggggcctgtgatgacatcgacttcaagtatcaattcctcaaagtcatggtcagggacacttttgccctcactcatacctcgctgcgcaatgcagcccaagcatactctctcccagtggagaagggatgctgtccctacaaggcagtcaatcagttctacatgttgggctcttaccgtgcagaaaaagacgggtttcccctcgaagagtactggaaggatcacgaagaataccttctcaaccgcgagctgtgggaaaagaaaagccaaccgcgttatgacatcatccaggaaactctcaactactgtgccctggatgtactcgtcaccgcagagctggtagccaagctgcaagagtcatatgcccacttcataagagactctgtaggcctacctcatgcccattttaacatattccagagacctactatttcttccaattcccatgccatctttcgccaaatcgtttacagggcggaaaaacccaaccgcaccaatctgggcccgggtcttctcgccccctcacatgaactctatgactatgtgcgagcaagcatcagaggggggcgctgttatcccacttacatcggcatcctcgaagagcccctctatgtctacgatatctgtggcatgtatgcctccgcgctcacccaccccatgccctggggcacccctcttaacccctatgagcgcgcgctggcagttcgagaatggcagatgaccttggatgatcctgccaccatcagctattttgacaaagatttgctaccgggaatatttaccatagatgcggacccccctgatgagttcatgctagaccccctcccccctttctgttcaagaaaaggaggtcgactctgctggaccaatgagcccctccgaggcgaggtggccaccagtgtggatctgataaccctgcacaataggggatggcgagtcagaatagttccggatgaactgacaaccatctttcctgaatggaaatgtgtggcgcgcgagtacgtccagcttaacatcgccgccaaggagcgcgcggacaaggaaaagaaccaaaccatgcgctccatcgccaagcttctatccaatgccctctatggatcatttgccaccaagctggacaacaagaagattgtgttttctgaccagatggacgagagtcttataaaaggcatctctgctggtactgtcaatatcaaatcctcctcgttcctagaaactgacaacctgagtgcagaggtcatgcccgcattcgagagggaatacctaccccaacagctggcgctcctggacagcgatccggaagacagtgaggacgaacagaggtccgcccccttttatacccccccggcggggacccctggtcacgtggcctacacttacaagccaatcacattcttggatgtggaggagggggacatgtgtttacataccgtagagaaggtggatcccctggttgacaacgaccgctacccctcccacgtggcctcctttgtgctggcctggacacgcgcttttgtatcagagtgggctggattcctctacgaagaggaccgaggcactccgctcgaggacaggcccataaagtcggtctacggggacacggacagcctctttgtcacccagcgtggacacgaactcatggaaaccaaaggtaagaaacgcatcaaaaaacatggcggaaaacttgtttttgaccctgatgagccggatctgacctggcttgtggagtgcgaaaccgtctgcgtctcctgcggtgcggatgcatactcccccgaatccattttcctcgcgcccaagctgtatgccctcaaatgtatctactgccctgcctgccataaaacttccaaaggtaagctccgtgccaaaggccacgcggccgaggcgctcaactacgaacttatggtaaactgctacctggccgacatgcagggcgccgatcggcagcggttctcgaccagcaggatgagtctgaagcgcaccctcgcaagcgcccaaccaggcgcgcaccccttcaccgtgacggaaacaaccctgactcggacgctgcgaccatggaaggatcggaccctggcagcgctggacgcccatcgtctgattccctactccaggagccgtcccaacccgcgaaacgaggaggtctgctggatcgagatgccatag

SEQ ID NO: 405 - DNA, 1047 bp, Adenovirus B7
  MISC_FEATURE (1)..(1047): B7.orf00049 IVa2 protein IVa2
atgcccatggctgacgggctgaagccgctgaaaaacttctcctcgctccaggagcttctatcacttgggggagagcgcctcctaacggacttggtgcgggaaaatatccatgtaagggaaatgatgaacgaagtggcccccctgctccgggaggacggcagctgtcgctccctaaactaccatctgcaacccgtaattggggtcatttacggtcccaccgggtgcggcaagtctcagctgcttaggaatttgctctcatcccagttaatcaccccggctccagaaacggtattttttatagccccgcaggtggacatgatccccccctctgaactgaaagcctgggaaatgcaaatatgtgagggaaactatgctcccgggccacagggaactttcatcccccaatctggcaccctccgcccaaagtttattaaaatggcttatgatgacctgactcaggagcataactatgatgtttcagacccccggaacgtgttcgcccgtgccgctgcccacggccccatcgctatcattatggatgagtgcatggagaatctggggggtcacaaaggcgtctccaaattttttcatgcttttccctctaagctgcatgataaatttcccaagtgcaccggatacactgtcttggtggtcctgcacaatatgaacccgagacgggatctaggcggcaacattgccaacctcaagatccagtccaaaatgcatataatttcaccccggatgcacccgtcccagctcaacagatttgtaaacacctacactaagggcctccccgttgcaattagtctgctcctaaaagatattgtgcaacaccatgcactccgaccttgctatgactgggtgatttataacactaccccggagcaagaggctcttcaatggagctatctccacccccgagacggactaatgcccatgtatctaaacattcaatcccacctttacagggtactggaaaagatccaccgagttctcaatgatcgaaaccgatggtccagggcataccgcgcgcgaaaaatcaaataa

SEQ ID NO: 406 - DNA, 417 bp, Adenovirus B7
  MISC_FEATURE (1)..(417): B7.orf00052 IX hexon-associated protein IX
atgagtggaagcgcttcttttgaggggggagtatttagcccttatctgacgggcaggctcccaccatgggcaggagttcgtcagaatgtcatgggatccactgtggatgggagacccgtccagcccgccaattcctcaacgctgacctatgccactttgagttcgtcaccattggatgcagctgcagccgccgccgctactgctgccgccaacaccatccttggaatgggctattacggaagcattgttgccaattccagttcctctaataatccttcaaccctggctgaggacaagctacttgttctcttggctcagctcgaggccttaacccaacgcttaggcgaactgtctaagcaggtggcccagttgcgtgagcaaactgagtctgctgttgccacagcaaagtctaaataa

SEQ ID NO: 407 - DNA, 1122 bp, Adenovirus B7
  MISC_FEATURE (1)..(1122): B7.orf00054 E1B transformation-associated 55 kDa protein
atgagccgcaggcgtcctgaaactgtttggtggcatgaggttcagagcgaaggcagggatgaagtttcaatattgcaggagaaatattcactagaacaacttaagacctgttggttggaacctgaggatgattgggaggtggccattaggaattatgctaagatatctctgaggcctgataaacaatatagaattactaagaagattaatattagaaatgcatgctacatatcagggaatggggcagaggttataatagatacacaagataaagcagcttttagatgttgtatgatgggtatgtggccaggggttgtcggcatggaagcaataacacttatgaatattaggtttagaggggatgggtataatggcattgtatttatggctaacactaagctgattctacatggttgtagcttttttgggtttaataatacgtgtgtagaagcttgggggcaagttagtgtgaggggttgtagtttttatgcatgctggattgcaacatcaggtagggtgaagagtcagttgtctgtgaagaaatgcatgtttgagagatgtaatcttggcatactgaatgaaggtgaagcaagggtccgccactgcgcagctacagaaactgcctgcttcattctaataaagggaaatgccagtgtgaagcataatatgatctgtggacattcggatgagaggccttatcagatgctaacctgcgctggtggacattgcaatattcttgctaccgtgcatatcgtttcacatgcacgcaagaaatggcctgtatttgaacataatgtgattaccaagtgcaccatgcatataggtggtcgcaggggaatgtttatgccttaccagtgtaacatgaatcatgtgaaggtaatgttggaaccagatgccttttccagagtgagcgtaacaggaatctttgatatgaatattcaactatggaagatcctgagatatgatgacactaaaccaagggtgcgcgcatgcgaatgcggaggcaagcatgctagattccagccggtgtgcgtggatgtgactgaagacctgaggcccgatcatttggtgcttgcctgcactggagcggagttcggttctagtggtgaagaaactgactaa

SEQ ID NO: 408 - DNA, 537 bp, Adenovirus B7
  MISC_FEATURE (1)..(537): B7.orf00055 E1B 21-kDa
atggaggtttgggctatcttggaagacctcagacagactaggctactactagaaaacgcctcggacggagtctctggcctttggagattctggttcggtggtgatctagctaggctagtgtttaggataaaacaggactacagggaagaatttgaaaagttattggacgacattccaggactttttgaagctcttaacttgggccatcaggctcattttaaggagaaggttttatcagttttagatttttctactcctggtagaactgctgctgctgtagcttttcttacttttatattggataaatggatccgccaaactcacttcagcaagggatacgttttggatttcatagcagcagctttgtggagaacatggaaggctcgcaggatgaggacaatcttagattactggccagtgcagcctctgggagtagcagggatactgagacacccaccgaccatgccagcggttctgcaggaggagcagcaggaggacaatccgagagccggcctggaccctccggtggaggagtag

SEQ ID NO: 409 - DNA, 201 bp, Adenovirus B7
  MISC_FEATURE (1)..(201): B7.orf00056 E1A mRNAII protein
gtgtctgatgatgagtcaccttctcctgattcaactacctcacctcctgaaattcaggcgcccgcacctgcaaacgtatgcaagcccattcctgtaaagcctaagcctgggaaacgccctgctgtggataagcttgaggacttgttggagggtggggatggacctttggaccttagtacccggaaactgccaaggcaatga

SEQ ID NO: 410 - DNA, 594 bp, Artificial Sequence
  B7.orf00058 E1A hypothetical protein
atgagacacctgcgcttcctgccacaggagattatctccagtgagaccgggatcgaaatactggagtttgtggtaaataccctaatgggagacgacccggaaccgccagtgcagccttttgatccacctacgctgcacgatctgtatgatttagaggtagacgggccggaggatcccaatgagggagctgtgaatgggttttttactgattctatgctgctagctgccgatgaaggattggacataaaccctcctcctgagacccttgtcaccccaggggtggttgtggaaagcggcagaggtgggaaaaaattgcctgatctgggagcagctgaaatggacttgcgttgttatgaagagggttttcctccgagtgatgatgaagatggggaaactgagcagtccatccataccgcagtgaatgagggagtaaaagctgccagcgatgtttttaagttggactgtccggagctgcctggacatggctgtaagtcttgtgaatttcacaggaataacactgggatgaaagaactattgtgctcgctttgctatatgagaatgcactgccactttatttacagtaagtgtatttaa

SEQ ID NO: 411 - DNA, 378 bp, Adenovirus B16
  MISC_FEATURE (1)..(378): B16.orf00002 E4 13.9 kDa protein
atggctgatgaggctttgtatgtgtatttagagggaccgggggcgacgttgcctgaacagcagcagagaaataattatattttttattctcctgtgccttttactttgtatccgcgaggggtggctttgctatacttaagattaagcataattatacccagaggctatgttggctgttttttctctttaactgatgctaacatgtctggattatatgcttcatcaagaattattcatgctggccaccgcgaggaactttcggtgctgttgtttaatcacgatgacaggttttacgagggtcaagctggagaccctgtggcttgtcttgtgatggaaagactgatttatccacctgttcgacaggctactatgatatga

SEQ ID NO: 412 - DNA, 435 bp, Adenovirus B16
  MISC_FEATURE (1)..(435): B16.orf00003 E4 ORF2 protein
atgacgcttgtttcttttattttacagactaattcaaaactaacaatgttggagcgcagcgcggtaacctattgcatttgcatcccagaggttttgaatgtttctttggaaaatttttcttttattcaatttttacaagaaactctgcctgattatatttccagcaactttgatgatattactggtggttcccagtatgcttattctaatcttgtttttgctggagccaattggggaggtctgcgcttgtactgcactgtagcgtcccctgctattgttcccggggggcttctggctaagcagtttggtgataatatgagagagtatttacaactagaacttagagaagaacttagagccaagggcatgtcaattgatgatgccattcttaatttgctacaggtgacacaggagcaagatattttgtcattatga

SEQ ID NO: 413 - DNA, 354 bp, Adenovirus B16
  MISC_FEATURE (1)..(354): B16.orf00004 E4 ORF3 protein
atgagggtgtgtttaagaatggtggtggagggcgccctccgggacctgtttgtaatgtgtggtttggatttaccacaagaactgacacgaataattcaaggctggaaagctgaaaattatctgggaatggtgcaggaatgtaatatgatgtttgaggagttagaaaatgctccttcttttggtattcttttgtttttggatgtgcgcgtggaggctttgttggaagccaccgttgagcaccttgaaaatcgcatttcttttgatttagctgtgctttttcaccaacacagtgggggcgatagatgccatctgcgcgatctacaatttgaagtactgcgagatcgtttggaataa

SEQ ID NO: 414 - DNA, 897 bp, Adenovirus B16
  MISC_FEATURE (1)..(897): B16.orf00010 E4 34 kDa protein
atgtcaggaagcaactccattatgacaaggttgcgcgcacgctcgacatcatgcgccagacatcacccttacaccagagcccagttaccacgatgtgaggaaaatgaaacccgagcttctatgactgaagaccacccgctgttgccagattgtgatactatgactatgcatagtgtaagttgtgttcgtggtcttccttgttctgccagctttactgttttgcaagagcttcctattccctgggatatgtttttaacccccgaagagttgagggttatgaaaagatgcatgcatttatgtttgtgttgtgccactatagatatatttaattctcaagtgatccatgggcgagagaagtgggttctccattgtcactgtaaacagccgggttctcttcaatgtattgctgggggagcagtgctagctatgtggttccggaaggttattaggggctgtatgattaaccagcgctgtccatggtacagagaaattgtgaacatgcatatgcccaaggaaattatgtatgtgggcagtgtgttctggagggggcgtcatctaatttacattaagatttggtacgatggtcacgcgggtatgattatccctgagatgagttttggctggagcacctttaattatggcctgttaaacaacattgtggtaatgtgttgtacctactgcagtgagctaagcgaaattagaatgcgttgttgtgcccatcgcaccaggatgttaatgttgagggctattaaaattatgcttcgagagactgtggatcctgatcccatcagcagcagtcgcacggagcggcgcagacagcgattgcttcgaggtttaagacacaaccgcccgatcccgttctcggattatgactcccatcgttcttcttccagatga

SEQ ID NO: 415 - DNA, 252 bp, Adenovirus B16
  MISC_FEATURE (1)..(252): B16.orf00011 E4 ORF6/7 protein
atgaccctaatccaaaccccggagccgcagccgcagcagttggactgtgaaaccaccttgaaagactgttccgatggatttatatctatcactgatccaagattggcccgctctgaaactgtgtggaatgtggaatctaaaactatgtctatctctaatggaattcaaatgttcaaagctgtgcgtggggagagaattgtgtattctataaaatgggaagaggggggcaaaataactactcgaatcttgtaa

SEQ ID NO: 416 - DNA, 1062 bp, Adenovirus B16; identical to SEQ ID NO: 134
  MISC_FEATURE (1)..(1062): B16.orf00013 L5 fiber protein

SEQ ID NO: 417 - DNA, 165 bp, Adenovirus B16
  MISC_FEATURE (1)..(165): B16.orf00014 U protein
atgaagattgtgggcaaagaagaggaactaaaatttgacatccctttcaaagtgtggaggaagtatgccacccgccgaggcttagagtaccagagttgggaagaaggaagtgaggtgctgcttggaaacaacgtagacagaaaccttatttctgatttcaagtaa

SEQ ID NO: 418 - DNA, 408 bp, Adenovirus B16
  MISC_FEATURE (1)..(408): B16.orf00016 E3 14.7 kDa protein
atgactgaaatactcaccacctccaattccgccgaggatctgcttgatatggacggccgcgcctcagaacagcgactcgcccaactacgcatacgccagcagcaggaacgtgccgccaaggagctcagggatgctattgaaattcaccaatgcaaaaaaggcatattttgtttggtaaaacaagccaagatatcctacgagattaccaatactgaccatcgcctctcatacgagctcggaccgcagcgacaaaaattcacttgtatggtgggaatcaaccccataatcatcacccagcaagctggagataccaagggttgcatccactgttcctgcagttccgccgagtgcatctacaccctgctgaagaccctctgcggccttcgagacctcctacccatgaactaa

SEQ ID NO: 419 - DNA, 405 bp, Adenovirus B16
  MISC_FEATURE (1)..(405): B16.orf00017 E3 14.9 kDa protein
atgcaggctatgctgccagtcattttaattctgctcctaccctgcattgccctagcttccaccgccactcgcgctacacctgaacaacttagaaaatgcaaatttcaacaaccatggtcatttcttgattgctaccatgaaaaatctgattttcccacatactggatagtgattgttggaataattaacatactttcatgtacctttttctcaatcacaatataccccacatttaattttgggtggaattctcccaatgcactgggttacccacaagaaccacatgaacatatcccactacaacacatacaacaaccactagcactggtagagtatgaaaatgagccacaaccttcactgcctcctgccattagttacttcaacctaaccggcggagatgactga

SEQ ID NO: 420 - DNA, 276 bp, Adenovirus B16
  MISC_FEATURE (1)..(276): B16.orf00019 E3 10.3 kDa protein
atgattcctagaaatttcttcttcaccatactcatctgtgctttcaatgtctgtgctactttcacagcagtagccactgcaagcccagactgtataggaccatttgcttcctatgcactttttgccttcgttacttgcatctgcgtgtgtagcatagtctgcctggttattaattttttccaactggtagactggatctttgtgcgaattgcctacctacgtcaccatcccgaataccgcaatcaaaatgttgcggcactttttaggcttatttaa

SEQ ID NO: 421 - DNA, 285 bp, Adenovirus B16
  MISC_FEATURE (1)..(285): B16.orf00021 E3 11 kDa protein
atgatattgtttcaatcaaataccactaacactatcaatgtgcagactactttaaatcatgacatggaaaaccacactacctcctatgcatacacaaacattcagcctaaatacgctatgcaactagaaatcaccatactaattgtaattggaattcttatactatctgttattctttattttatattctgccgtcaaatacccaatgttcatagaaattctaaaagacgacccatctattctcctatgattagtcgtccccatatggctctgaatgaaatctaa

SEQ ID NO: 422 - DNA, 570 bp, Adenovirus B16
  MISC_FEATURE (1)..(570): B16.orf00023 E3 20.5 kDa glycoprotein
atgatttccactacaatttttatcattactagccttgcagctgtaacttatggccgttcacacctaactgtacctgttggctcaacatgtacactacaaggaccccaagaaggccatgtcacttggtggagaatatatgataatggagggttcgctagaccatgtgatcagcctggtacaaaattttcatgcaacggaagagacttgaccattattaacataacattaaatgagcaaggcttctattatggaaccaactataaaaatagtttagattacaacattattgtagtgccagccaccacttctgctccccgcaaatccactttctctagcagcagtgccaaagcaagcacaattcctaaaacagcttctgctatgttaaagcttcgaaaaatcgctttaagtaattccacagccgctcccaatacaattcctaaatcaacaattggcatcattactgccgtggtagtgggattaataattatatttttgtgcataatgtactacgcctgctgctatagaaaacatgaacaaaaaggtgatgcattactaaattttgatatttaa

SEQ ID NO: 423 - DNA, 540 bp, Adenovirus B16
  MISC_FEATURE (1)..(540): B16.orf00024 E3 20.1 kDa protein
atggcttctgttacagctctaattattgccagcattgtcactgtcgctcacgggcaaacaattgtccatattaccttaggacataatcacactcttgtagggcccccaattacttcagaggttatttggaccaaacttggaagtgttgattattttgatataatttgcaacaaaactaaaccaatatttgtaatctgcaacagacaaaatctcacgttaattaatgtcagcaaaatttataacggttactattatggttatgatagatccagtagtcaatataaaaattacttagttcgcataactcaacccaaatcaacagtgccaactatgacaataattaaaatggctaataaagcattagaaaattttacattaccaacaacgcccaatgaaaaaaacattccaaattcaatgattgcaattattgcggcggtggcattgggaatggcactaataataatatgcatgttcctatatgcttgttgctataaaaagtttaaacataaacaggatccactactaaattttaacatttaa

SEQ ID NO: 424 - DNA, 519 bp, Adenovirus B16
  MISC_FEATURE (1)..(519): B16.orf00025 E3 19.2 kDa protein
atgggggccatactagtcgtgcttgctttactttcgcttttgggtctgggctctgctaatctcaatcctcttgatcacgatccatgtctagacttcgacccagaaaactgcacacttacttttgcacccgacacaagccgtctctgtggagttcttattaagtgcggatgggactgcaggtccgttgaaattacacataataacaaaacatggaacaataccttatccaccacatgggagccaggagttcccgagtggtatactgtctctgtccgaggtcctgacggttccattcgcattagtaacaacactttcattttttctgaaatgtgcgatctggccatgtttatgagcaaacagtatgacctatggcctcctagcaaagagaacattgtggcattttccattgcttattgcttggtaacatgcatcatcactgctatcatttgtgtgtgcatacacttgcttatagttattcgccctagacaaagcaatgaggaaaaagagaaaatgccttaa

SEQ ID NO: 425 - DNA, 321 bp, Adenovirus B16
  MISC_FEATURE (1)..(321): B16.orf00028 E3 11.7 kDa protein
atgtctaatggtggcgcggctgagctagctcgactgcgacacctagaccactgccgccgctttcgctgtttcgcccgggaactcaccgagttcatctacttcgaactctccgaggagcaccctcagggtccggcccacggagtgcggattaccatcgaagggggaatagactctcgcctgcatcgcatcttctcccagcggcccgtgctgattgagcgcgaccagggaaatacaaccatctccatctactgcatttgtaaccaccccggattgcatgaaagcctttgctgtcttgtttgtgctgagtttaataaaaactga

SEQ ID NO: 426 - DNA, 684 bp, Adenovirus B16
  MISC_FEATURE (1)..(684): B16.orf00029 L4 protein VIII
atgagtaaagagattcccacgccttacatgtggagctatcagccccaaatggggttggcagcaggtgcttcccaggactactccacccgcatgaattggcttagcgccgggccctcaatgatatcacgggttaatgatatacgagcttatcgaaaccagttactcctagaacagtcagctctcaccaccacaccccgccaacaccttaatccccgaaattggcccgccgccctggtgtaccaggaaaatcccgctcccaccaccgtactacttcctcgagacgcccaggccgaagttcagatgactaacgcaggtgtacagctggcgggcggttccgccctatgtcgtcaccgacctcaacagagtataaaacgcctggtgatcagaggccgaggtatccagctcaacgacgagtcggttagctcttcgcttggtctgcgaccagacggagtcttccagatcgccggctgtgggagatcttccttcactcctcgtcaggctgtgctgactttggagagttcgtcctcgcagccccgctcgggcggcatcggaactctccagtttgtggaggagtttactccctctgtctacttcaaccccttctccggctctcctggccagtacccggacgagttcataccgaacttcgacgcaatcagcgagtcagtggatggctatgattga

SEQ ID NO: 427 - DNA, 297 bp, Adenovirus B16
  MISC_FEATURE (1)..(297): B16.orf00030 L4 33 kDa protein
gtgaccagaaaaccagcagttagaaaatccacaacaagtgcagcaggaggaggactgaggatcacagcgaacgagccagcgcagaccagagagctgaggaaccggatctttccaaccctctatgccatcttccagcagagtcgggggcaagagcaggaattaaaagtaaaaaaccgatctctgcgctcgctcaccagaagttgtttgtatcacaagagcgaagaccaacttcagcgcactctcgaggacgccgaggctctcttcaacaagtactgcgcgctgactcttaaagagtag

SEQ ID NO: 428 - DNA, 129 bp, Adenovirus B16
  MISC_FEATURE (1)..(129): B16.orf00031 L4 22 kDa protein
gtgaacttcccccgcaatatcttgcattactaccgtcacctccacagcccctactgcagtcagcaagtcccggcaaccccgacagaaaaagacagcagcgacaacggtgaccagaaaaccagcagttag

SEQ ID NO: 429 - DNA, 2487 bp, Adenovirus B16
  MISC_FEATURE (1)..(2487): B16.orf00032 L4 100 kDa hexon-assembly associated protein
atggaaactcagccatcactgccaacatcgctgcaagcgccatcacacctcgcccccagcagcgacgaggaggagagcttaaccaccccaccacccagtcccgctaccaccacctctaccctcgatgatgaggaggaggtcgacgcagcccaggagatgcaggcgcaggataatgtgaaagcggaagagattgaggcagatgtcgagcaggacccgggctatgtgacaccggcggagcacgaggaggagctgaaacgttttctagacagagaggatgacgaccgcccagagcatcaagcagatggcgatcaccaggaggctggcctcggggatcatgttgccgactacctctccgggcgtgggggggaggacgtgctcctcaaacatctagcaaggcagtcgctcatagttaaagacgcactactcaacctcaccgaagtgcccatcagtgtggaagagcttagccgcgcctacgagctgaacctcttttcgcctcagataccccccaagcggcagccaaacggcacctgcgaggccaaccctcgactcaacttctatccagcttttactgtccccgaagtgctggccacctaccacatcttttttaagaaccaaaagattccagtctcctgccgcgccaaccgcacccgcgcagatgcccttctcaacttgggtccgggagctcgcttacctgatatagcttccttggaagaggttccaaagatctttgagggtctgggaagtgatgagactcgggccgcaaatgctctgcaacagggagagaatggcatggatgaacatcacagcgctctagtggaactggagggtgacaatgcccggcttgcagtgctcaagcgcagtatcgtggtcacccattttgcctaccccgctgttaacctgccgcccaaagtcatgagcgctgtcatggaccatctgctcatcaaacgagcaagtccactttcagaaaaccagaacatgcaggatccagacgcctcggacgagggcaagccggtagtcagtgacgagcagctatctcgctggctgggtaccaactccccccgagatttggaagaaagacgcaagcttatgatggctgtagtgctagtaactgttgagttggagtgtctgcgccgcttttttaccgaccccgagaccctgcgcaagctagaggagaacctgcactacaccttcagacatggcttcgtgcggcaggcatgcaagatctccaacgtggagctcaccaacctggtttcatacatgggcattttgcatgagaaccggctagggcagagcgttctgcacaccaccctgaagggggaggcccgccgcgactacatccgagactgtgtctacctctacctctgccatacctggcagactggtatgggtgtgtggcaacagtgtttggaagagcagaaccttaaagagctggacaagctcttgcagagatccctcaaagccctgtggacaggttttgacgagcgcaccgtcgcctcggacttggcggacatcatcttccccgagcgtcttagggttactctgcgaaacggcctgccagacttcatgagccagagcatgcttaacaactttcgctctttcatcctggaacgctccggtatcctgcctgccacctgctgtgcgctgccctccgactttgtgcctctcacctaccgcgagtgcccaccgccgctatggagccactgctacctattccgcctggccaactacctctcctaccactcggatgtgatagaggatgtgagcggagacggcctgctggaatgccactgccgatgcaatttatgcacaccccaccgctccctcgcctgcaacccccagttgctaagcgagacccagatcatcggcaccttcgagttgcagggtcccaacagtgaaggcgaggggtcttctccggggcagagtctgaaactgacaccggggctgtggacctccgcctacctgcgcaagtttcatcccgaggactatcatccctatgagatcaggttctatgaggaccagtcacatcctcccaaagtcgagctctcagcctgcgtcatcacccagggggcaattctggcccaattgcaagccatccaaaaatcccgccaagaatttctgctgaaaaagggaagcggggtctaccttgacccccagaccggtgaggagctcaacacaaggttcccccaggatgtcccatcgccgaggaagcaagaagctgaaggtgcagctgtcacccccagaggatatggaggaagactgggacagtcaggcagaggaggagatggaagattgggacagccaggcagaggaggtggacagcctggaggaagacagtttggaggaggaagacgaggaggcagaggaggtggaagaagcaaccgccgccaaacagttgtcatcggcggcggagacaagcaagtccccagacagcagcacggctaccatctccgctccgggtcggggggcccagcggcggcccaacagtag

SEQ ID NO: 430 - DNA, 1554 bp, Adenovirus B16
  MISC_FEATURE (1)..(1554): B16.orf00034 E2A DNA binding protein
atggccagccgcggaggaaatcagtcaagcgaccgccaacgggagcacacccccgaacgcggaatgggctctgccagccatccgcctccaaggccagaccgcagcccatctcagtcgcctccacctctgcccccgaagaggaacacctaccgtcgcgtggggtccgattcttctatcgagagccaggtggtactggtaagcgaaacttcgcggtcatccctgtctccggaacggagcaacagtcctcccccgatccctcccaagaagaagcccaggaagaccaagcatgtccctctgcaagacatcagccaggacagcgaagaagaaagagaacaggctcagttggtggccgtgggcttcagctaccccccggtgcgcatcattgagaaggatggcaagagaagtgttgagaagatcgacaagaatgaccctatagctaaaggagctacttctattgctgttaggaatcctttgagcttgcccctggtatctgcctgggagaagggcatggaagtgatggctgtgctaatggagaggtataggctggataatgacctgagaacctctttcaagctgatgccagagcagcacgagcagtacaagcgtatctgccaccagtatgtgaacgaggagcaccgtggcattccgctgacatttagtagcatgaagaccctgacagcgatgatgggaagattcatgcagggattggtgcattcttattctgagatcgcccacaataattgggagtgcaccgggtgcgctctgtgggctcatggatgcaccgattacgaaggcaaggtgaaatgcctgcatggcactatcatgatccagaaggaccacattatcgagatggatgtggcgagcgagaacgggcagcgcgctatgaaggagaacccagacagagccaagatcacccagaaccgctggggcagaaatgtggttcagttggccaacaacgatgcccgctgctgtgtaaatgatgccaactgtgctactaaccaattttccagcaagtcctgtggaatgttctacaccgagggaagtaaggctcaggaagctttcaagcagtacgaagccttcatgaaggccgtatatccagggataacccccgaccaagccaggatgatgctgattcccattcattgcgattgcaaccacaagccaggctgcgctcccgtgatgggcaggcagacctgtaagatgaccccctttgggatggccaatgctgaagacttggatgtgactaccatcagtgacccgaccgtgctggcaagcgtgagacacccagccttgatggtgttccagtgttgcaacccagtgtaccgcaactcccgtgtccagaatgccggccccaactgtgatttcaagatctctgctcctgacctgcttggcgccctgcaactgaccagaaagttgtggcaagacacctttcccgagattccagttcccaagctggtgatccccgagttcaagtggcagaacaggttacagttccgcaacgtatccctgcccgcgggccactatgactcccgccagaacccatttgatttctga

SEQ ID NO: 431 - DNA, 630 bp, Adenovirus B16
  MISC_FEATURE (1)..(630): B16.orf00036 L3 23 kDa proteinase
atgtcatgcgggtccggaaacggctccagcgagcaagagctcaaagccatcgtccgagacctgggttgcggtccctatttcctgggaacctttgacaagcgtttcccggggttcatggcccccgacaagctcgcctgcgccatagtcaacactgccggacgcgagacggggggagagcactggctggcttttggttggaacccgcgctccaacacctgctacctttttgatccttttgggttctcggatgagcgactcaaacagatttaccagtttgagtacgaggggctcctgcgccgcagtgcccttgctaccaaagaccgctgcatcaccctggaaaagtccacccagagcgtgcagggcccacgctcagccgcctgtggacttttttgctgtatgttccttcatgcctttgtgcactggcccgaccgtcccatgaacggaaaccccaccatgaagttgctgactggggtgcccaacagcatgctccaatctccccaagtccagcccaccctgcgccgcaaccaggaggcactataccgcttcctaaacacccactcatcttactttcgttctcaccgcgcacgcatcgaaagggccaccgcgtttgaccgtatggatatgcaataa

SEQ ID NO: 432 - DNA, 2823 bp, Adenovirus B16; identical to SEQ ID NO: 194
  MISC_FEATURE (1)..(2823): B16.orf00038 L3 hexon protein

SEQ ID NO: 433 - DNA, 138 bp, Adenovirus B16
  MISC_FEATURE (1)..(138): B16.orf00039 L3 hexon
atgtgcatgtatgcccattggggcatcatcgatggggtggccatcttgaaagcaactcagcctcggcgcgcgacctcttcctttctcctctgctgcggcggcatggtgatgatacatacacacagacaagcaagttaa

SEQ ID NO: 434 - DNA, 753 bp, Adenovirus B16
  MISC_FEATURE (1)..(753): B16.orf00041 L3 protein pVI
atggaagacatcaatttttcatccctggctccgcgacacggcacgaggccgtacatgggcacctggagcgacatcggcacgagccaactgaacgggggcgccttcaattggagcagtatctggagcgggcttaaaaattttggctcgaccataaaaacctatgggaacaaagcttggaacagcagcacagggcaggcccttagaaataagcttaaggagcagaacttccaacaaaaggtggtcgatggtatcgcctctggtattaacggcgtagtggatctagccaaccaggctgtgcagaaacagataaacagccgcctggacccgccgcccgcaactcctggtgaaatggaagtggaggaagagcttcctccgctggagaagcggggcgacaagcgaccgcgtcccgagctggaacagacgttggtgacgcgcgcagacgagcccccttcatacgaggaggcagtaaagctcggaatgcccactaccaggcctgtagctcacatggctaccggggtgatgaaaccttctcagtcgcatcggcctgccaccttggacttgcctcctccccctgcttctgcggcgcctattcccaaacctgtcgctaccagaaagcccaccgccgtacagcccgtcgccgtagccagaccgcgtcctgggggcacaccgcgcccgaaagcaaactggcagagtactctgaacagcatcgtgggtctgggcgtgcagagtgtaaagcgccgtcgctgctattaa

SEQ ID NO: 435 - DNA, 228 bp, Adenovirus B16
  MISC_FEATURE (1)..(228): B16.orf00042 L2 protein X
atggctctcacttgccgccttcgcgtccccattactggctaccgaggaagaaactcgcgccgtagaaggatgttggggcgagggatgcgccgccacagacgaaggcgcgctatcagcaagcgattagggggtggctttctgccagctcttatacccatcatcgccgcggcgatcggggcgataccaggcatagcttccgtggcggttcaggcctcgcagcgccactaa

SEQ ID NO: 436 - DNA, 1053 bp, Adenovirus B16
  MISC_FEATURE (1)..(1053): B16.orf00044 L2 protein V
atgtccaagcgcaaatacaaggaagagatgctccaggtcatcgcgcctgaaatctacggtccgccgatgaaggatgaaaaaaagccccgcaaaatcaagcgggttaaaaaggacaaaaaagaagaagatggcgatgatggactggtggagtttgtgcgcgagttcgcgccaagacggcgcgtgcagtggcgcggtcgaaaagtacgccaagtgcttagacccgggaccactgtggtctttacacctggcgagcgttccagcactacttttaaacggtcctatgatgaggtgtatggggatgacgatattattgagcaggcggcagaccgccttggcgagtttgcttatggcaagcgcacaagatccagtcccaaagaggaggcggtatctattcccttggatcatggaaatcccacccctagcctcaaaccagtcaccctgcagcaagtgctgcccgtacctgcgagcagaggcgtaaagcgcgagggtgaggacctatatcccaccatgcagctaatggtgcccaagcggcagagattagaagacgtactggagaaaatgaaagtggatgccgatatccagcctgaggtgaaagtgagacccatcaaggaagtggcgccaggtttgggagtacaaacctttgacatcaagattcccactgagtccatggaagtgcagaccgaacctgcaaaacccacagtcacctcaattgaggttcagacggaaccctggatgcccgcgcccgttgccgcccccagcaccactagaagatcacgtcgaaagtatggcccagcaagtctgctaatgcccaactatgctctgcacccatccatcattcccactccgggttacagaggcactcgctactatcgaagtcggagcaacacctcacgccgccgcaaactacctgcaagtcgcactcgccgtcgccgccgccgcaccactgccagcaaattaactcccgccgccctggtgcggagagtgtaccgcgatggtcgcgctgaacctctgacgctgccgcgcgcgcgctatcatccaagcatcaccacttaa

SEQ ID NO: 437 - DNA, 579 bp, Adenovirus B16
  MISC_FEATURE (1)..(579): B16.orf00045 L2 protein VII
atgtccattctcatctcgcccagtaataataccggttggggactgcatgcgcccaccaagatgtacggaggcgcccgcaaacgctctacccagcaccccgtgcgcgttcgcggtcatttccgcgctccctggggcgccctcaagggccgtacccgcactcggaccacggtcgatgatgtgatcgaccaggtggttgccgatgctcgtaattatactcctactgcgcctacatctactgtggatgcagttattgacagtgtagtggcagacgctcgcgcctatgctcgccggaagagccgaaggaggcgcatcgccaggcgccacagggctactcccgctatgcgagctgcaaaagctattctgcggagggccaaacgtgtgggacgaagagccatgcttagagcggccagacgcgcggcttctggtgctagcagcggcaggtcccgcaggcgcgcggccacggcggcagcagcggccattgccaacatggcccaaccgcgaagaggcaatgtgtattgggtgcgcgatgccactaccggccagcgcgtgcccgtgcgcacccgcccccctcgcacttag

SEQ ID NO: 438 - DNA, 1668 bp, Adenovirus B16; identical to SEQ ID NO: 166
  MISC_FEATURE (1)..(1668): B16.orf00047 L2 penton protein

SEQ ID NO: 439 - DNA, 1767 bp, Adenovirus B16
  MISC_FEATURE (1)..(1767): B16.orf00048 L1 protein IIIa
atggaacaacagcaggcaccggaccccgcaatgcgggcggcgctacagagccagccgtccggcattaactcctcggacgattggacccaggccatgcaacgtataatggcgctgacgacccgcaaccccgaagcctttagacagcaaccccaggccaaccgcctttcggccatactggaggccgtagtgccctcccgctccaaccccacccacgagaaggtcctggctatcgtgaacgcgctggtggagaacaaggccatccgtcccgatgaggccgggctggtatacaatgctcttttggagcgcgtggcccgttacaacagcagcaacgtgcagaccaacctggaccggatggtgaccgatgtgcgcgaggctgtgtctcagcgcgagcggttccagcgcgacgccaacttggggtcattggtagcgctaaacgctttccttagcacccagcccgccaacgtgccccgtggtcagcaagactatacaaactttttgagtgcattgagactcatggtatctgaggtgccccagagcgaggtgtaccagtccgggccagattacttcttccagaccagcagacagggcttgcagacagtgaacctgacccaggctttcaagaacctgaagggtctgtggggagtgcacgccccagtaggagatcgcgcgaccgtgtctagcttgctgactcccaactcccgcctgctgctgctgctggtatcccccttcactgacagcggtagcatcgaccgcaactcctacttgggctacctgcttaacctgtatcgcgaggctataggacagagccaggtggacgagcagacctatcaagaaatcacccaagtgagccgcgccctgggtcaggaagacacaggcggtttggaagccaccctgaacttcttactaaccaaccggtcgcagaagatccctcctcagtatgcgcttaccgctgaggaggagcggatcctaagatacgtgcaacagagcgttggactgtttttgatgcaggagggggcgacacctaccgccgcgctggatatgacagctcgaaacatggagcccagcatgtatgctagtaacaggcctttcattaacaaactgctggactacctgcacagggcggccgccatgaactctgattatttcaccaatgctattctgaacccacactggctgcccccacctggtttctacactggcgaatacgacatgcccgatcccaatgacgggttcctatgggacgatgtggacagtagcatattttccccgccgccaggttatacggtttggaagaaggaagggggcgatagaaggcactcttccgtatcgttgcccggaacggctggtgctgccgcggccgtgcccgaagctgcgagtcctttccctagcttgtccttttcactaaacagcgttcgcagcagtgaactggggagaataaaccgcccgcgcttgatgggcgaggatgagtacttgaatgactctttgctgaggccagagagggaaaagaacttccctaacaatggaatagagagcctggtggataagatgagtagatggaagacctatgcgcaggatcacagagacgagcccaggatcttgggggctacaagcagaccgagccgtagacgccagcgccacgacaggcagatgggtcttgtgtgggacgacgaggactctgccgatgacagcagcgtgttggacttgggtggaaaaggagttggcaacccgttcgctcatctgcgtccccgtttcggtcgcatgttgtaa

SEQ ID NO: 440 - DNA, 1170 bp, Adenovirus B16
  MISC_FEATURE (1)..(1170): B16.orf00049 L1 55 kDa protein
atgcatcccgtgctgcgacagatgcgcccccagcaacagcccccttctcagcagcagctacaacaacagccacaaaaggctcttcctgctcctgtaactactgcggctgcagccgtcagcggcgcgggacagcccgcctatgatctggacttggaagagggcgagggattggcgcgcctgggggctccatcgcccgagcggcacccgcgggtgcaactaaaaaaggactctcgcgaggcgtacgtgccccaacagaacctattcagggacaggagcggcgaggagccagaggagatgcgagcatctcgatttaacgcgggtcgcgagctgcgccacggtctggatcgaagacgggtgctgcaagacgaggattttgaggtcgatgaagtgacagggatcagcccagctagggcacatgtggccgcggccaacctagtctcggcctacgagcagaccgtgaaggaggagcgcaacttccaaaaatcttttaacaaccatgtgcgcaccctgatcgcccgcgaggaagtgaccctgggtctgatgcacctgtgggacctgatggaggctatcacccagaaccccactagcaaacccctgacagctcagctgtttctggtggttcaacatagcagggacaacgaggcattcagggaggcgttgttgaatatcaccgagcctgatgggagatggctgtatgatctgattaacatcctgcaaagtattatagtgcaggaacgtagcctgggtttggctgagaaagtggcagctatcaactactcggtcttgagcctgggcaaatactacgctcgcaagatctacaagaccccctacgtacccattgacaaggaggtgaagatagatgggttttacatgcgcatgactctcaaggtgttgactttaagcgacgatctgggggtgtatcgcaatgacaggatgcaccgcgcggtgagcgccagcaggaggcgcgagctgagcgacagagaacttatgcacagcttgcaaagggctctaacgggggccggaactgatggggagaactactttgacatgggagcggacttgcaatggcaacccagtcgcagggccatggaggctgcagggtgtgagcttccttacatagaagaggtggatgaagtcgaggacgaggagggcgagtacttggaagactga

SEQ ID NO: 441 - DNA, 1923 bp, Adenovirus B16
  MISC_FEATURE (1)..(1923): B16.orf00055 E2B terminal protein
atgaactacttcatgccgctgcgcaacatctggaaccgcgtacgcgagttcccgcgggcatccaccaccgcctccggtatcacctggatgtccaggtacatctacggttatcaccgcctcatgctggaagacctcgcccctggcgccccggctacagagcgatggcccctataccgccagccgccgcctcactttctcatcggctaccagtacctggtgcgcacctgtaacgattacatctttgacacccgcgcctactcgcgcctcaagtacaccgagattgtgcgtccggggcaccagacagtcaactggtcagtcatggccaactgctcctacacaatcaacaccggggcttaccaccgcttcgtggactttgacgacttccaagccaccctcacccaggtgcagcaagccatcctcgcagaaagggttgtagcggacctggcacttgtccagcccatgcgcgggttcgggatcactcgcatgcatggcagagcgggcgaagaagaagtgcccgtggaacgactcatgcaagactactataaagatctggccagatgtcaggataatgcttggggaatggcccatcgcctgcgcatccaacaagccggacccaaagacctggtgctcctcgccaccatccgccgtctcaaaactgcctattttaatttcatcaccagcagcatcgtctcaccctccaaagaggaggaaggagaagaaagagagaaccccgaccgagcgtctagccgcccccgcccgcaagaaacagtgctcagcctaccttgcgattgcgactggttagacgctttcgtcgaaaggttttcagatcccgtggatcttgagacgatcaggtccttgcgcggagtacctacggggcaattgataaaatgcataatcagcgcggtgtccctgcccaacggagagcctcccagtcaccacttcagggagatgcgcggaggcgtcttcactctgagacccagggagaacggtcgtgccgtcaccgagaccatgcgccgccgccgcggagaggtcattgaaagattcatcgaccgtctgcctgtgcgccgccggcgtcgccgcgttccccctcctcctgcagccccacctgaagaggaagagatgttagtggaagaagaagaaattgaggaagaaatcccgggggctttcgagcgcgaggtgcgcaccaccatcgccgaactcatccgtcttctggaagaggagttgaccgtgtccgcgcgtaactcccagtttttcaactttgccgtggacttctacgaggccatggagcgcttggaagcgctgggcgatgttagcgagatgccgctgagacgatggatcatgtatttcttcgtcaccgagcacatcgccaccacactcaactaccttttccagcgcctatgcaactatgcggtcttcacccgccacgtggagctcaacctcgcccaggtggtcatgcgcgcgagagatcccgagggggctgtggtctacagccgcgtctggaacgaggcgggcatgaatgcattctctcaactcattggacgcatctccaacgaccttgcggccaccgtcgagagagcgggccgcggagatcttcaagaggaagagatcgagcagttcatggccgagatcgcctaccaggacaactctggcgacgtgcaagaaatccttaggcaagccgccgtcaacgataccgagattgattctgttgaactctctttcaggttcaagctcacggggccggtagcgttcacccagaggcgtcagatccaggatgtcaaccgccgcgtcgtcgcgcatgcaagtcttctcagggcgcagtaccagaacctacccgcgcgcggcgccgacgtaccactgccggccatgccgccgggtcccgagccgcccctgccgcccggtgcgcgccctcgacaccgcttctaa

SEQ ID NO: 442 - DNA, 3369 bp, Adenovirus B16
  MISC_FEATURE (1)..(3369): B16.orf00056 E2B DNA polymerase
atgcaagaagcaacagagccaccgccgcccaaacggaaaaacaagggcacggtggtagcgcccaaggggcacggaaccctgcaagccatcgacatctccaccaacggacccgtggagatcaagtaccatctgaacctccctcacgccctcgaaaagatcatgcaagtcaatctcctgacactgcctactaacctgactccgcagcgtctcaggaccctggacagctccgacctgcgcgctctcgtcctcgagctccgcccctgccgcgccgaggtctggacttgcctcccgcgagggctcgtcagcatgaccaccatcgagacagaagatggtcatgccgatgcagacaacatagtagagcgcgaggtacaagcgccaggcctcaattttccactgaaatttctcgtcaaaggaagtcaggtacaactcattcatgaggtgcatcccgtgaatcgatgcgagtactgcggccgtctgtacaagcacaagcatgaatgctcggcgcgtcgcagggagttctacttccatcacatcaacagccattcctccaactggtggcaggagatccagttcttcccgattggctctcatcctcgcacagaaaggctcttcctcacctacgatgtggaaacctacacctggatggggtcctttggcaagcagctaatccccttcatgctggtcatgaaactctctggagaccagcggctcgtcaacatcgcctatgacctggctataaaactcaagtgggatcgctggcagcaggacccccaaaccttctattgcgtcaccccagaaaagatggcagtcgggcagcattttcgtcagtaccgggaccagttacaaacagcactggcagtggacctctggtcctccttcctcaaagcgaaccctcacctgcacgaatgggccctcgaacactatgctctcactgaccctacagacctcacttttgaagaactcaagaagctgcctcatgtcaggggcacacctcgattcttagaactgtacatagtggggcacaacatcaatggctttgatgagatcgtcttggccgctcaggttatcaataaccgagcagaggtccctcagcctttcagaatcacccgaaattttatgcccagggccggcaagatcctcttcaatgatgttactttcgctttgcccaaccccgcctacaagaagcgggtggacttccaactctgggaacagggggcctgtgatgacatcgacttcaagtatcaattcctcaaagtcatggtcagggacacttttgccctcactcatacctcgctgcgcaatgcagcccaagcatactctctcccagtggagaagggatgctgtccctacaaggcagtcaatcaattctacatgttgggctcttaccgtgcagaaaaagacgggtttcccctcgaagagtactggaaggatcgcgaagaataccttctcaaccgcgagctgtgggaaaagaaaaaccaaccgcgttatgacatcatccaggaaactctcgactactgtgccctagacgtacttgtcaccgccgagctggtagccaagctgcaagagtcatatgcccacttcataagggactctgtaggcctccctcatgcccattttaacatattccagagacctactatctcttccaattcccatgccatctttcgccagatcgtttacagggcggaaaaacccaaccgcaccaatctgggcccgggtcttctcgccccctcacatgaactctatgactatgtgcgagcaagcatcagaggggggcgctgttatcccacttacatcggcatcctcgaagagcccctctatgtctacgatatctgtggcatgtatgcctccgcgctcacccaccccatgccctggggcacccctcttaacccctatgagcgcgcgctggcagttcgagaatggcagatgactttggatgatcccgccaccatcagctattttgacaaggatttgctaccgggaatatttaccatagatgcggacccccctgatgagttcatgctagaccccctcccccctttctgttcaagaaaaggaggtcgactctgctggaccaatgagcccctccgaggcgaggtagccaccagtgtggatctgataaccctgcacaataggggatggcgagtcagaatagttccggatgaactgacaaccatcttccctgaatggaaatgtgtggcgcgcgagtacgtccagcttaacatcgccgccaaggagcgcgcggacaaggaaaagaaccaaaccatgcgctctatcgccaagcttctatccaatgccctctatggatcatttgccaccaagctggacaacaagaagattgtgttttctgaccagatggacgagagtcttatgaaaggcatctctgctggtactgtcaatatcaaatcctcctcgttcctagaaactgacaacctgagtgcagaggtcatgcccgccttcgagagggaatacctaccccaacagctggcgctcctggacagcgatccggaagacagtgaagacgaacagaggcccgcccccttttatacccccccggcggggacccctggtcacgtggcctacacttacaagccaatcacattcttggatgtggaggagggggacatgtgtttacataccgtagagaaggtggaccccctggttgacaacgaccgctacccctcccacgtggcctcctttgtgctggcctggacacgcgcttttgtatcagagtgggctgggttcctctacgaagaggaccgcggcactccgctcgaggacaggcccataaagtcagtctacggggacacggacagcctctttgttacccagcggggacacgaactcatggaaaccaaaggtaagaaacgcatcaaaaaacatggcggaaaacttgtttttgaccccgatgagccggatctgacatggctcgtggagtgcgaaaccgtctgcgcctcctgcggtgcggatgcatactcccccgaatccattttcctcgcgcccaagctgtatgccctcaaatgtatctactgccccgcctgccataaaacttccaaaggtaagctccgtgccaaaggccacgcggccgaggcgctcaactacgaactcatggtaaactgctacctggccgacatgcagggcgccgatcggcagcggttctcgaccagcaggatgagtctgaagcgcaccctcgcaagcgcccaaccaggcgcgcaccccttcaccgtgacggaaacaaccctgactcggacgctgcgaccatggaaggatcggaccctggcagcgctggacgcccatcgtctgattccctactccaggagccgtcccaacccgcgaaacgaggaggtctgctggatcgagatgccatag

SEQ ID NO: 443 - DNA, 1047 bp, Adenovirus B16
  MISC_FEATURE (1)..(1047): B16.orf00057 IVa2 protein IVa2
atgcccatggctgacgggctgaagccgctgaaaaacttctcctcgctccaggagcttctatcccttgggggagagcgcctcctaacggacttggtgcgggaaaatatccatgtaagggaaatgatgaacgaagtggcccccctgctccgggaggacggcagctgtcgctccctaaactaccatctgcaacccgtaattggggtcatttacggtcccactgggtgcggcaagtctcagctgcttaggaatttgctctcatcccagttaatcaccccggctccagaaacagtattttttatagccccgcaggtggatatgatccccccctctgaactgaaagcctgggaaatgcaaatatgtgagggaaactatgctcccgggccagagggaactttcatcccccaatctggcacccttcgcccaaagtttattaaaatggcttatgatgacctgactcaggagcataactatgatgtttcagacccccggaacgtgttcgcccgtgccgctgcccacggccccatcgctatcattatggatgagtgcatggagaatctggggggtcacaaaggcgtctccaaattttttcatgcttttccctctaagctgcatgataaatttcccaagtgcaccggatacactgtcttggtggttctgcacaatatgaaccccagacgggatctaggcggcaacattgccaacctcaagatccagtccaaaatgcatataatttcaccccggatgcacccgtcccagctcaacagatttgtaaacacctacactaagggcctccccgttgcaattagtctgctcctaaaagatattgtgcaacaccatgcactccgaccttgctatgactgggtgatttataacactaccccggagcaagaggctcttcaatggagctatctccacccccgggacggactaatgcccatgtatctaaacattcaatcccacctttacagggtactggaaaagatccaccgagttctcaatgatcgagaccgatggtccagggcataccgcgcgcgaaaaatcaaataa

SEQ ID NO: 444 - DNA, 417 bp, Adenovirus B16
  MISC_FEATURE (1)..(417): B16.orf00059 IX hexon-associated protein IX
atgagtggaagcgcttcttttgaggggggagtatttagcccttatctgacgggcaggctcccaccatgggcaggagttcgtcagaatgtcatgggatccactgtggatgggagacccgtccagcccgccaattcctcaacgctgacctatgccactttgagttcgtcaccattggatgcagctgcagccgccgccgctactgctgccgccaacaccatccttggaatgggctattacggaagcatcgttgccaattccagttcctctaataacccttcaaccctggctgaggacaagctacttgttctcttggctcagctcgaggccttaacccaacgcttaggcgaactgtctaagcaggtggcccagttgcgtgagcaaactcagtctgctgttgccacagcaaagtctaaataa

SEQ ID NO: 445 - DNA, 1479 bp, Adenovirus B16
  MISC_FEATURE (1)..(1479): B16.orf00060 E1B large T antigen
atggatccgccaaacccacttcagcaagggatacgttttggatttcatagcagcagctttgtggagaacatggaaggctcgcaggatgaggacaatcttagattactggccagtgcagcctctgggagtagcagggatactgagacacccaccggccatgccagcggttctggaggaggagcagcaggaggacaatccgagagccggcctggaccctccggtggaggagtagctgacttgtttcctgaactgcgacgggtgcttactaggtctacgtccagtggacaggacaggggcattaagagggaaaggaatcctagtgggaataattcaagaaccgagttggctttaagtttaatgagccgtaggcgtcctgaaactgtttggtggcatgaggttcagagcgaaggcagggatgaagtttcaatattgcaggagaaatattcactagaacaacttaagacctgttggttggaacctgaggatgattgggaggtggccattaggaattatgctaagatatctctgaggcctgataaacagtatagaattactaagaagattaatattagaaatgcatgctacatatcagggaatggggcagaggttataatagatacacaagataaagcagcttttagatgttgtatgatgggtatgtggccaggggttgtcggcatggaagcagtaacatttatgaatattaggtttaaaggggatgggtataatggcattgtatttatggctaacactaagctgattctacatggttgtagcttttttgggtttaataatacttgtgtagaagcttgggggcaagttagtgtgaggggttgtagtttttatgcatgctggattgcaacatcaggtagggtcaagagtcagttgtctgtgaagaaatgcatgtttgagagatgtaatcttggcatactgaatgaaggtgaagcaagggtccgccactgcgcagctacagaaactggctgcttcattctaataaagggaaatgccagtgtgaagcataatatgatctgtggacattcgaatgagaggccttatcagatgctgacctgcgctggtggacattgcaatattctggctaccgtgcatatcgtttcccatgcacgcaagaaatggcctgtatttgaacataatgtgattaccaagtgcaccatgcacataggtggtcgcaggggaatgtttatgccttaccagtgtaacatgaatcatgtgaaggtgatgttggaaccagatgccttttccagagtaagcttaacaggaatctttgatatgaatattcaactatggaagatcctgagatatgatgacactaaaccgagggtgcgcgcatgcgaatgcggaggcaagcatgctagattccagccggtgtgcgtggatgtgactgaagacctgagacccgatcatttggtgcttgcctgcactggagcggagttcggttctagtggtgaagaaactgactaa

SEQ ID NO: 446 - DNA, 141 bp, Adenovirus B16
  MISC_FEATURE (1)..(141): B16.orf00061 E1B 20 kDa small T antigen
atgaaatccaaaacgtatcccttgctgaagtgggtttggcggatccatttatccaatataaaagtaagaaaagctacagcagcagcagttctaccaggagtagaaaaatctaaaactgataaaaccttctccttaaaatga

SEQ ID NO: 447 - DNA, 126 bp, Artificial Sequence
  B16.orf00063 hypothetical protein
atggcagcaggttgctatgagctaaccacacagatctgctcctacttatatatccaagtccccacccaagaagcaataaaacactcagcagctgacataattttattacatgacgtcactaaataa

SEQ ID NO: 448 - DNA, 201 bp, Adenovirus B16
  MISC_FEATURE (1)..(201): B16.orf00064 E1A 25.7 kDa protein
gtgtctgatgatgagtcaccttctcctgattcaactacctcacctcctgaaattcaggcgcccgtacctgcaaacgtatgcaagcccattcctgtgaagcctaagtctgggaaacgccctgctgtggataagcttgaggacttgttggagggtggggatggacctttggaccttagtacccggaaactgccaaggcaatga

SEQ ID NO: 449 - DNA, 594 bp, Artificial Sequence
  B16.orf00066 E1A hypothetical protein
atgagacacctgcgattcctgccacaggagattatctccagcgagaccgggatcgaaatactggagtttgtggtaaataccctgatgggagatgacccggaaccgccagtgcagcctttcgatccacctacgctgcacgatctgtatgatttagaggtagacgggcctgatgatcccaatgaggaagctgtaaatgggttttttactgattctatgctgctagctgccgatgaaggattggacataaaccctcctcctgagacccttgataccccaggggtggttgtggaaagcggcagaggtgggaaaaaattgcctgatctgggagcagctgaaatggacttgcgttgttatgaagagggttttcctccgagtgatgatgaagacggggaaactgaacagtccatccataccgcagtgaatgagggagtaaaagctgccagcgatgtttttaagttggactgtccggagctgcctggacatggctgtaagtcttgtgaatttcacaggaataacactggaatgaaagaactattgtgctcgctttgctatatgagaatgcactgccactttatttacagtaagtgtatttaa

SEQ ID NO: 450 - DNA, 378 bp, Adenovirus B21
  MISC_FEATURE (1)..(378): B21.orf00002 E4 14.2 kDa protein
atggctgatgaggctttgtatgtgtatttagatggaccgggggcgacgttgcctgaacagcggcagagaaataattatattttttattctcctgtgccttttactttgtatccgcgaggggtggctttgctatacttaagattaagcataattatacccagaggctatgttggctgttttttctctttaactgatgctaacatgtctggattatatgcttcatcaagaattattcatgctggccaccgcgaggaactttcggtgctgttgtttaatcacgatgacaggttttacgagggtcgagctggagaccctgtggcttgtcttgtgatggaaagactgatttatccacctgttcgacaggctactatgatatga

SEQ ID NO: 451 - DNA, 435 bp, Adenovirus B21
  MISC_FEATURE (1)..(435): B21.orf00003 E4 ORF2 protein
atgacgcttgtttcttttattttgcagactaattcaaaactaacaatgttggagcgcagcgcggtaacctattgcatttgcatcccagagattttgaatgtttctttggaaaatttttcttttattcaatttttacaagaaactctgcctgattatatttccagcaactttgatgatattactggtggttcccagtatgcttattctaatcttgtttttgctggagccaattggggaggtctgcgcttgtactgcactgtagcgtcccctgctattgttcccggggggcttttggctaagcagtttggtgataatatgagagagtatttacaactagaacttagagaagaacttagagccaagggcatgtcaattgatgatgccattcttaatttgctacaggtgacacaggagcaagatattttgtcattatga

SEQ ID NO: 452 - DNA, 354 bp, Adenovirus B21
  MISC_FEATURE (1)..(354): B21.orf00004 E4 ORF3 protein
atgagggtgtgtttaagaatggtggtggagggcgccctccgtgacctgtttgtaatgtgtggtttggatttaccacaagaactgacacgaataattcaaggctggaaagctgaaaattatctgggaatggtgcaggaatgtaatatgatgtttgaggagttagaaaatgctccttcttttggtattcttttgtttttggatgtgcgcgtggaggctttgttggaagccaccgttgagcaccttgaaaatcgcatttcttttgatttagctgtgctttttcaccaacacagtgggggcgatagatgccatctgcgcgatctacaatttgaagtactgcgagatcgtttggaataa

SEQ ID NO: 453 - DNA, 900 bp, Adenovirus B21
  MISC_FEATURE (1)..(900): B21.orf00008 E4 ORF6 protein
atgtcaggaaacaactccattatgacaaggttgcgcgcacgctcgacatcatgcgccagacatcacccttacaccagagcccagttaccacgatgtgaggaaaatgaaacccgagcttctatgactgaagaccacccgctgttgccagattgtgatactatgactatgcatagtgtaagttgtgttcgtggtcttccttgttctgccagctttactgttttgcaagagtttcccattccttgggatatgtttttaaatccagatgagttaaaaattatgagaagatgcatgcatttatgtctttgttgtgctactatagatatttttcagtctcaagtgattcatggtcgagagaattgggttcttcattgtcattgtaatcagcagggttcacttcaatgcatggctgggggagcggtgttggcagtgtggttccggaaggttatattgggttgcatgattaaccaacgttgtccatggtacagacagattgttaatatgcacatgccaaaagagatcatgtatgtgggtagtgtgtttttgagggaacgacatttaatttatattaaaatttggtatgatggtcatgcaggggcgattgtatcagatatgagttttggctggagcgcttttaattatggtttattaaacaatattgtgataatgtgctgtacatactgtagtaatctaagtgaaatcagaatgcgttgctgcgcgcatcgcaccagaaagttaatgttaagggctattaaaatcatgcttcaggacactgcagaccccgatcccataaacagcagtcgcacggagcgacgcagacagcggctgcttgtgggtttgatgagacacaatcgcccgattccgttttcggattatgattcccatcgttcttcttccagatga

SEQ ID NO: 454 - DNA, 252 bp, Adenovirus B21
  MISC_FEATURE (1)..(252): B21.orf00009 E4 ORF6/7 protein
atgactgtgatccagactccggagtcgcatccgcagcagttggactgtgaaagcgctttaaaagactatcccgatgcatttttatgtatcactgaccccagattggctcgctctgaaactgtttggaatgtggaaactaaaactatgtctatctctaatggtatccaaatgtttaaagctgtgcgtggggagagattggtgtattctgttaaatgggaagggggaggcaaaataactactcgaattttgtga

SEQ ID NO: 455 - DNA, 972 bp, Adenovirus B21; identical to SEQ ID NO: 135
  MISC_FEATURE (1)..(972): B21.orf00010 L5 fiber protein

SEQ ID NO: 456 - DNA, 165 bp, Adenovirus B21
  MISC_FEATURE (1)..(165): B21.orf00011 U protein
atgaagatcgtgggtacaggagaggagctaaaatttgacatcccatttaaagtatggagaaagtatgccgctgaacggggtttagaataccagagttgggaagagggaagcgaggtgctgctgggaaaaaatttcaacagagaccttattgctgatttcaagtaa

SEQ ID NO: 457 - DNA, 408 bp, Adenovirus B21
  MISC_FEATURE (1)..(408): B21.orf00014 E3 15 kDa protein
atgactgaaatactcaccacctccaattccgccgaggatctgcttgatatggacggccgcgcctcagaacagcgactcgcccaactacgcatccgccagcagcaggaacgcgtgaccaaagagctcagagatgtcatccaaattcaccaatgcaaaaaaggcatattttgtttggtaaaacaagccaagatatcctacgagatcaccgctactgaccatcgcctttcttacgaacttggcccccaacgacaaaaatttacatgcatggtgggaatcaaccctatagttatcacccagcaaagtggagatactaagggttgcattcactgctcttgcgattccaccgagtgcacctacaccctgctgaagaccctatgcggcctaagagacctgctacccatgaattaa

SEQ ID NO: 458 - DNA, 438 bp, Adenovirus B21
  MISC_FEATURE (1)..(438): B21.orf00016 E3 16.5 kDa protein
atgttgcggcacttcttaggcttatttaaaaccatgcaggctatgctaccagttattttaattctgctactaccctgcattgccctaccttccaccgccactcgcgctacacctgaacaacttagaaaatgcaaatttcaacaaccatggtcatttcttgattgctaccatgaaaaatctgattttcccacatactggatagtgattgttggaataattaacatactttcatgtaccgttttctcaatcacaatataccccacatttaattttgggtggaattctcccaatgcactgggttacccacaagaactagatgaacatatcccactacaacacatacaacaaccactagcattggtagagtatgaaaatgagccacaaccttcactgcctcctgctattagttacttcaacctaaccggcggagatgactga

SEQ ID NO: 459 - DNA, 276 bp, Adenovirus B21
  MISC_FEATURE (1)..(276): B21.orf00018 E3 10.3 kDa protein
atgattcctagaaatttcttcttcaccatactcatctgtgctttcaatgtctgtgctactttcacagcagtagccactgcaagcccagactgtataggaccatttgcttcctatgcactttttgcctttgttacttgcatctgcgtgtgtagcatagtctgcctggttattaattttttccaactggtagactggatctttgtgcgaattgcctacctacgtcaccatcccgaataccgcaatcaaaatgttgcggcacttcttaggcttatttaa

SEQ ID NO: 460 - DNA, 285 bp, Adenovirus B21
  MISC_FEATURE (1)..(285): B21.orf00020 E3 11 kDa protein
atgatattgtttcaatcaaatgccactaacactctcaatgtgcagactactttaaaacatgacatggaaaaccacactacctcctatgcatacacaaatattcagcctaaatacgctatgcaactagaaatcaccatactaattgtaattggaattcttacactatctgttattctttattttatattctgccgtcaaatacccaatgttcatagaaattctaaaagacgtcccatctattctcctatgattagtcgtccccatatggctctgaatgaaatctaa

SEQ ID NO: 461 - DNA, 570 bp, Adenovirus B21
  MISC_FEATURE (1)..(570): B21.orf00022 E3 20.8 kDa protein
atgatttccactacaatttttatcattactagccttgcagctgtaacttatggccgttcacacctaactgtacctgttggctcaacatgtacactacaaggaccccaagaaggctatgtcacttggtggagaatatatgataatggagggttcgctagaccatgtgatcagcctggtacaaaattttcatgcaacggaagagacttgaccattattaacataacattaaatgagcaaggcttctattatggaaccaactataaaaatagtttagattacaacattattgtagtgccagccaccacttctgctccccgcaaatccactttctctagcagcagtgccaaagcaagcacaattcctaaaacagcttctgctatgttaaagcttcgaaaaatcgctttaagtaattccacagcagctcccaatacaattcctaaatcaacaattggcatcattactgccgtggtagtgggattaatgattatatttttgtgcataatgtactacgcctgctgctatagaaaacatgaacaaaaaggtgatgcattactaaattttgatatttaa

SEQ ID NO: 462 - DNA, 540 bp, Adenovirus B21
  MISC_FEATURE (1)..(540): B21.orf00023 E3 20.1 kDa protein
atggcttctgttacagctctaattattgccagcattgtcactgtcgctcacgggcaaacaattgtccatattaccttaggacataatcacactcttgtagggcccccaattacttcagaggttatttggaccaaacttggaagtgttgattattttgatataatttgcaacaaaactgaaccaatatttgtaatctgtaacagacaaaatctcacgttaattaatgttagcaaaatttataacggttactattatggttatgatagatccagtagtcaatataaaaattacttagttcgcataactcagcccaaatcaacagtgccaactatgacaataattaaaatggctaataaagcattagaaaattttacattaccaacaacgcccaatgaaaaaaacattccaaattcaatgattgcaattattgcggcggtggcattgggaatggcactaataataatatgcatgttcctatatgcttgttgctataaaaagtttcaacataaacaggatccactactaaattttaacatttaa

SEQ ID NO: 463 - DNA, 519 bp, Adenovirus B21
  MISC_FEATURE (1)..(519): B21.orf00024 E3 19.2 kDa protein
atgggggccatactagtcgtgcttgctttactttcgcttttgggtctgggctctgctaatctcaatcctcttgatcacgatccatgtctagacttcgacccagaaaattgcacacttacttttgcacccgacacaagccgtctctgtggagttcttattaagtgcggatgggactgcaggtccgttgaaattacacataataacaaaacatggaacaatacattatccaccacatgggaaccaggagttcccgagtggtatactgtctctgtccgaggtcctgacggttccattcgcattagtaacaacactttcattttttctgaaatgtgcgatctggccatgtttatgagcaaacagtatgacctatggcctcctagcaaagagaacattgtggcattttccattgcttattgcttggtaacatgcatcatcactgctatcatttgtgtgtgcatacacttgcttatagttattcgccctagacaaagcaatgaggaaaaagagaaaatgccttaa

SEQ ID NO: 464 - DNA, 321 bp, Adenovirus B21
  MISC_FEATURE (1)..(321): B21.orf00027 E3 11.7 kDa protein
atgtctaatggtggcgcggctgagctagctcgactgcgacacctagaccactgccgccgctttcgctgtttcgcccgggaactcaccgagttcatttacttcgaactctccgaggagcaccctcagggtccggcccacggagtgcggattaccatcgaagggggaatagactctcgcctgcatcgcatcttctcccagcggcccgtgctgattgagcgcgaccagggaaatacaaccatctccatctactgcatctgtaaccaccccggattgcatgaaagcctttgctgtcttgtttgtgctgagtttaataaaaactga

SEQ ID NO: 465 - DNA, 684 bp, Adenovirus B21
  MISC_FEATURE (1)..(684): B21.orf00028 L4 pVIII protein
atgagtaaagacattcccacgccttacatgtggagctatcagccccaaatggggttggcagcaggtgcttcccaggactactccacccgcatgaattggcttagcgccgggccctcaatgatatcacgggttaatgatatacgagcttatcgaaaccagttactcctagaacagtcagctcttaccaccacaccccgccaacaccttaatccccgaaattggcccgccgccctggtgtaccaggaaaatcccgctcccaccaccgtactacttcctcgagacgcccaggccgaagttcagatgactaacgcaggtgtacagctggcgggcggttccgccctatgtcgtcaccggcctcaacagagtataaaacgcctggtgatcagaggccgaggtatccagctcaacgacgagtcggttagctcttcgcttggtctgcgaccagacggagtcttccagatcgccggctgtgggagatcttccttcactcctcgtcaggctgtgctgactttggagagttcgtcctcgcagccccgctcgggcggcatcggaactctccagtttgtggaggagtttactccctctgtctacttcaaccccttctccggctctcctggccagtacccggacgagttcataccgaacttcgacgcaatcagcgagtcagtggatggctatgattga

SEQ ID NO: 466 - DNA, 297 bp, Adenovirus B21
  MISC_FEATURE (1)..(297): B21.orf00029 L4 33 kDa protein
gtgaccagaaaaccagcagttagaaaatccacaacaagtgcagcaggaggaggactgaggatcacagcgaacgagccagcgcagaccagagagctgaggaaccggatctttccaaccctctatgccatcttccagcagagtcgggggcaagagcaggaattgaaagtaaaaaaccgatctctgcgctcgctcaccagaagttgtttgtatcacaagagcgaagaccaacttcagcgcactctcgaggacgccgaggctctcttcaacaagtactgcgcgctgactcttaaagagtag

SEQ ID NO: 467 - DNA, 129 bp, Adenovirus B21; identical to SEQ ID NO: 428
  MISC_FEATURE (1)..(129): B21.orf00030 L4 22 kDa protein

SEQ ID NO: 468 - DNA, 2472 bp, Adenovirus B21
  MISC_FEATURE (1)..(2472): B21.orf00031 L4 100 kDa hexon-assembly associated protein
atggaaactcagccatcactgccaacatcgctgcaagcgccatcacacctcgcccccagcagcgacgaggaggagagcttaaccaccccaccacccagtcccgctaccaccacctctaccctcgatgatgaggaggaggtcgacgcagcccaggagatgcaggcgcaggataatgtgaaagcggaagagattgaggcagatgtcgagcaggacccgggctatgtgacaccggcggagcacgaggaggagctgaaacgttttctagacagagaggatgacgaccgcccagagcatcaccaggaggctggcctcggggatcatgttgccgactacctctccgggcttgggggggaggacgtgctcctcaaacatctagcaaggcagtcgatcatagttaaagacgcactactcaacctcaccgaagtgcccatcagtgtggaagagcttagccgcgcctacgagctgaacctcttttcgcctcagataccccccaagcggcagcgaaacggcacctgcgaggccaaccctcgactcaacttctatccagcttttactgtccccgaagtgctggccacctaccacatcttttttaagaaccaaaagattccagtctcctgccgcgccaaccgcacccgcgcagatgcccttctcaacttgggtccgggagctcgtttacctgatatagcttccttggaagaggttccaaagatctttgagggtctgggaagtgatgagactcgggccgcaaatgctctgcaacagggagagaatggcatggatgaacatcacagcgctctagtggaactggagggtgacaatgcccggcttgcagtgctcaagcgcagtatcgtggtcacccattttgcctaccccgctgttaacctgccgcccaaagtcatgagcgctgtcatggaccatctgctcatcaaacgagcaagtccactttcagaaaaccagaacatgcaggatccagacgcctcggacgagggcaagccggtagtcagtgacgagcagctatctcgctggctgggtaccaactccccccgagatttggaagaaagacgcaagcttatgatggctgtagtgctagtaactgttgagttggagtgtctgcgccgcttttttaccgaccccgagaccctgcgcaagctagaggagaacctgcactacaccttcagacatggcttcgtgcgccaggcatgcaagatctccaacgtggagctcaccaacctggtttcatacatgggcattttgcatgagaaccggctagggcagagcgttctgcacaccaccctgaagggggaggcccgccgcgactacatccgagactgtgtctacctctacctctgccatacctggcagactggtatgggtgtgtggcaacagtgtttggaagagcagaaccttaaagagctggacaagctcttgcagagatccctcaaagccctgtggacaggttttgacgagcgcaccgtcgcctcggacctggcggacatcatcttccccgagcgtcttagggttactctgcgaaacggcctgccagacttcatgagccagagcatgcttaacaactttcgctctttcatcctggaacgctccggtatcctgcctgccacctgctgtgcgctgccctccgactttgtgcctctcacctaccgcgagtgcccaccgccgctatggagccactgctacctattccgcctggccaactacctctcctaccactcggatgtgatagaggatgtgagcggagacggcctgctggaatgccactgccgatgcaatttatgcacaccccaccgctccctcgcctgcaacccccagttgctaagcgagacccagatcatcggcaccttcgagttgcagggtcccaacagtgaaggcgaggggtcttctccggggcagagtctgaaactgacaccggggctgtggacctccgcctacctgcgcaagttttatcccgaggactatcatccctatgagatcaggttctatgaggaccagtcacatcctcccaaagtcgagctctcagcctgcgtcatcacccagggggcaattctggcccaattgcaagccatccaaaaatcccgccaagaatttctgctgaaaaagggaagcggggtctaccttgacccccagaccggtgaggagctcaacacaaggttcccccaggatgtcccatcgccgaggaagcaagaagctgaaggtgcagctgtcacccccagaggatatggaggaagactgggacagtcaggcagaggaggagatggaagattgggacagccaggcagaggaggtggacagcctggaggaagacagtttggaggaggaagacgaggaggcagaggaggtggaagaagcaaccgccgccaaacagttgtcatcggcggcggagacaagcaagtccccagacagcagcacggctaccatctccgctccgggtcggggggcccagcggcggcccaacagtag

SEQ ID NO: 469 - DNA, 1554 bp, Adenovirus B21
  MISC_FEATURE (1)..(1554): B21.orf00033 E2A DNA binding protein
atggccagccgcggaggaaatcagtcaagcgaccgccaacgggagcacacccccgaacgcggaatgggctctgccagccatccgcctccaaggccggaccgcagcccatctcagtcgcctccacctctgcccccgaagaggaacacctaccgtcgcgtggggtccgattcttctatcgagagccaggtggtactggtaagcgaaacttcgcggtcatccctgtctccggaacggagcaacagtcctcccccgatccctcccaagaagaagcccaggaagaccaagcatgtccctctgcaagacatcagccaggacagcgaagaagaaagagaacaggctcagttggtggccgtgggcttcagctaccccccggtgcgcatcattgagaaggatggcaagagaagtgttgagaagatcgacaagaatgaccctatagctaaaggagctacttctattgctgttaggaatcctttgagcttgcccctggtatctgcctgggagaagggcatggaagtgatggctgtgctaatggagaggtataggctggataatgacctgagaacctctttcaagctgatgccagagcagcacgagcagtacaagcgtatctgccaccagtatgtgaacgaggagcaccgtggcatcccgctgacatttagtagcatgaagaccctgacagcgatgatgggaagattcatgcagggattggtgcattcttattctgagatcgcccacaataattgggagtgcaccgggtgcgctctgtgggctcatggatgcaccgattacgaaggcaaggtgaaatgcctgcatggcactattatgatccagaaggaccacattatcgagatggatgtggcgagcgaaaacgggcagcgcgctatgaaggagaacccagacagagccaagatcacccagaaccgctggggcagaaatgtggtccagttggccaacaacgatgcccgctgctgtgtgaatgatgccaactgtgctactaaccaattttccagcaagtcctgtgggatgttttacaccgagggaagtaaggctcaggaagctttcaagcagtacgaagccttcatgaaggccgtgtacccagggataacccccgaccaagccaggatgatgctgatccccattcattgcgattgcaaccacaagccaggctgcgctcccgtgatgggcaggcagacctgtaagatgaccccctttggaatggccaatgctgaagacttggatgtgactaccatcagtgacccgaccgtgctggcaagcgtgagacacccagccttgatggtgttccagtgttgcaacccagtgtaccgcaactcccgtgtccagaatgccggccccaactgtgatttcaagatctctgctcctgacctgcttggcgccctgcaactgaccagaaagttgtggcaagacacctttcccgaaattccagttcccaagctggtgatccccgagttcaagtggcagaacaggttacagttccgcaacgtctccctgcccacgggtcactctgactcacgccagaacccatttgatttctga

SEQ ID NO: 470 - DNA, 630 bp, Adenovirus B21
  MISC_FEATURE (1)..(630): B21.orf00034 L3 23 kDa protein
atgtcatgcgggtccggaaacggctccagcgagcaagagctcaaagccatcgtccgagacctgggctgcggaccctatttcctgggaacctttgacaagcgtttcccggggttcatggcccccgacaagctcgcctgcgccatagtcaacactgccggacgcgagacggggggagagcactggctggcttttggttggaacccgcgctccaacacctgctacctttttgatccttttgggttctcggatgagcgactcaaacagatttaccagtttgagtacgaggggctcctgcgccgcagtgcccttgctaccaaagaccgctgcatcaccctggaaaagtccacccagagcgtgcagggcccgcgctcagccgcctgtggacttttttgctgtatgttccttcatgcctttgtgcactggcccgaccgccccatgaacggaaaccccaccatgaagttgctgactggggtgtcaaacagcatgctccaatcaccccaagtccagcccaccctgcgtcgcaaccaggaggcgctatatcgcttcctaaacacccactcatcttactttcgttctcaccgcgcacgcatcgaaagggccaccgcgtttgaccgtatggatatgcaataa

SEQ ID NO: 471 - DNA, 129 bp, Adenovirus B21
  MISC_FEATURE (1)..(129): B21.orf00035 L3 23 kDa proteinase
atggctttgagctcttgctcgctggagccgtttccggacccgcatgacatggctgcagctgctgcttgcaagaagcaagaggcttcttatgtggtggcgttgccggccgagaacggtgtgcgcaggtag

SEQ ID NO: 472 - DNA, 2850 bp, Adenovirus B21; identical to SEQ ID NO: 195
  MISC_FEATURE (1)..(2850): B21.orf00036 L3 hexon protein

SEQ ID NO: 473 - DNA, 750 bp, Adenovirus B21
  MISC_FEATURE (1)..(750): B21.orf00039 L3 protein VI
atggaagacatcaatttttcatccctggctccgcgacacggcacgaggccgtacatgggcacctggagcgacatcggcaccagccaactgaacgggggcgccttcaattggagcagtatctggagcgggcttaaaaattttggctctaccataaaaacctatgggaacaaagcttggaacagcagcacagggcaggcattgagaaataagcttaaagagcaaaacttccaacagaaggtggttgatggaatcgcctctggtatcaatggggtggtggatctggccaaccaggccgtgcagaaacagataaacagccgcattgacccgccgccgtcagccccgggtgaaatggaagtggaggaagatctccctccccttgaaaagcggggcgacaagcgtccgcgccccgatctggaggagacactagtcacacgctcagacgacccgccctcctacgaggaggcagtgaagcttggaatgcccaccaccagacctgtagcccccatggctaccggggtaatgaaaccttctcagtcacaccgacccgctaccttggacttgcctccccctgctgttgcagcgcctgctcgcaagcctgtcgctaccccgaagcccaccaccgtacagcccgtcgccgtagccagaccgcgtcctgggggcactccacgtccgaatgcaaactggcagagtactctgaacagcatcgtgggtctgggcgtgcaaagtgtaaagcgccgtcgctgcttttaa

SEQ ID NO: 474 - DNA, 231 bp, Adenovirus B21
  MISC_FEATURE (1)..(231): B21.orf00041 L2 protein X
atggccctcacttgccgccttcgtgtccccattactggctaccgaggaagaaactcgcgccgtagaagagggatgttggggcgcggaatgcgacgccacaggcggcggcgcgctatcagcaagaggctggggggtggctttctgcctgctctgatccccatcatagccgcggcgatcggggcgataccaggcatagcttccgtggcggttcaggcctcgcagcgccactga

SEQ ID NO: 475 - DNA, 1062 bp, Adenovirus B21
  MISC_FEATURE (1)..(1062): B21.orf00042 L2 protein V
atgtccaagcgcaaatacaaggaagagatgctccaggtcatcgcgcctgaaatctacggtccgccggtgaaggatgaaaaaaagccccgcaaaatcaagcgggtcaaaaaggacaaaaaggaagaagatggcaatgatggtctggcggagtttgtacgcgagttcgccccaaggcggcgtgtgcagtggcgtggacgcaaagtgcggcctgtgctgagacctggaaccacggtggtctttacgcccggcgagcgctccagcactgcttttaagcggtcctatgatgaggtgtatggggatgatgatattctggagcaggcggccgaccgcctgggcgagtttgcttatggcaagcgctcccgctcgagccccaaggaggaggcggtgtccattcccttggacaatgggaatcccacccctagtctcaagccagtcaccctgcagcaagtgctgcccgtgcctccacgcagaggcaacaagcgagagggtgaggatctgtatcccactatgcaattgatggtgcccaagcgccagcggctggaggacgtgctggagaaaatgaaagtggatcccgatatacaacctgaggtcaaagtgagacccatcaagcaggtggcgccaggtttgggagtacaaaccgtagacatcaagattcccaccgagtccatggaagtccaaaccgaacctgcaaagcccacaaccacctccattgaggtgcaaacggatccctggatgaccgcacccgttacaactccagctgctgtcaacaccactcgaagatcccggcgaaagtacggtccagcaagtttgctgatgccaaattatgctctgcacccatccattattccaactccgggttaccgaggcactcgctactaccgcagcaggagcagcacttcccgccgtcgccgcaaaacacctgcaagtcgtagtcaccgtcgtcgccgccgccccaccagcaatctgactcccgctgctctggtgcggagagtgtatcgcgatggccgcgcggatcccctgacgttgccgcgcgtacgctaccatccaagcatcacaacttaa

SEQ ID NO: 476 - DNA, 579 bp, Adenovirus B21
  MISC_FEATURE (1)..(579): B21.orf00044 L2 protein VII
atgtccattcttatctcacctagtaataacaccggttggggcctgcgcgcgccaagcaagatgtacggaggtgctcgcaaacgctctacacagcaccctgtgcgcgtgcgcgggcacttccgcgctccatggggcgccctcaagggtcgtgcccgcactagaaccaccgtcgatgatgtgatcgaccaggtggtggccgatgctcgtaattatactcctactgcacctacatctactgtggatgcagttattgacagcgtagtggctgacgcccgcgcctatgctcgccggaagagcaggcggagacgcatcgccaggcgccaccgggctactcccgctatgcgagcggcaagagctctgctacggagggccaaacgcgtggggcgaagagctatgcttagagcggccagacgcgcggcttcaggtgccagtgccggcaggtcccgcaggcgcgcagccacggcggcagcagcggccattgccaacatggcccaaccgcgaagaggcaatgtgtactgggtgcgcgacgccaccaccggccagcgcgtgcccgtgcgcacccgcccccctcgctcttag

SEQ ID NO: 477 - DNA, 1686 bp, Adenovirus B21; identical to SEQ ID NO: 167
  MISC_FEATURE (1)..(1686): B21.orf00045 L2 penton protein

SEQ ID NO: 478 - DNA, 1764 bp, Adenovirus B21
  MISC_FEATURE (1)..(1764): B21.orf00046 L1 protein IIIa
atggaacagcaggcaccggaccccgcaaaacgggcggcgctacagagccagccgtccggcattaactcctcggacgattggagccaggccatgcaacgcatcatggcgctgacgacccgcaaccccgaagcctttaggcagcaaccccaggccaaccgcctttctgctatcctggaggccgtagtgccctcccgctccaaccccacacacgagaaggtcctggccatcgtgaacgcgctggtggagaacaaagccatacgtcccgatgaggctgggctggtatacaatgccctattggagcgcgtagcccgctacaacagcagcaacgtgcagaccaacctggaccggatggtgaccgatgtgcgcgaggccgtgtctcagcgcgagcggttccagcgagacgccaatttagggtcgctggtggctttgaacgccttcctcagcactcagcctgccaacgtgcctcgcggtcagcaagactacacaaactttctaagtgcattgagactcatggtggccgaagtccctcaaagcgaagtgtaccagtccgggccagactactttttccagaccagcagacagggcttgcagacagtgaacctgagccaggcttttaagaacctgaatggtctgtggggagtgcgcgccccagtgggagatcgggcgaccgtgtctagcttgctgacccccaactcccgcctactactgctcttggtagccccattcactgacagcggtagcatcgaccgtaattcgtacttgggctatctgttgaacctgtatcgcgaggccatagggcaaactcaggtagatgagcaaacctatcaagaaattacccaagtgagccgcgctctgggtcgggaggacactggcagcttggaagccaccttaaacttcttgctgaccaaccggtcgcagaagatccctcctcagtatgcgcttaccgcggaggaggaacggatcctgagatacgtgcagcagagcgtgggactgttcctaatgcaggagggggcgactcctactgctgcgctcgatatgacagcccgaaacatggagcccagcatgtatgccagtaaccggccttttatcaataaactgctagactacttacacagggcggctgctatgaactctgattatttcaccaatgctatcctgaacccccattggctgcccccacctgggttctatacgggcgagtatgacatgcccgaccccaatgacgggtttttatgggacgatgtggacagtagtgttttctccccgcctcctggttataacacttggaagaaggaaggtggcgatagaaggcactcttccgtgtcactgtccggggcaacgggtgctgccgcagcggctcccgaggccgcaagtcctttccctagtttgccattttcgctaaacagtgtacgcagcagtgagctgggaagaataacccgtcctcgcttgatcggcgaggaggagtatttgaacgactccctgttgagacccgagagggagaagaatttccccaacaacgggatagaaagcttggttgacaaaatgaaccgctggaagacgtacgcgcacgatcacagggacgatccccgggcgctgggggatagccggggcagcgctacccgtaaacgccagtggcacgacaggcagcggggcctggtgtgggccgatgatgattccgccgacgacagcagcgtgttggacttgggtgggagtggtggtaacccgttcgctcacctgcgcccccgcgtcgggcgcctgatgtaa

SEQ ID NO: 479 - DNA, 1170 bp, Adenovirus B21
  MISC_FEATURE (1)..(479): B21.orf00047 L1 43 kDa protein
atgcatcccgtgctgcgacagatgcgcccccagcaacagcccccttctcagcagcagctacaacaacagccacaaaaggctcttcctgctcctgtaactactgcggctgcagccgtcagcggcgcggggcagcccgcctatgatctggacttggaagagggcgagggactggcgcgcctgggcgcaccatcgcccgagcggcacccgcgggtgcaactgaaaaaggactctcgcgaggcgtacgtgccccagcagaacctgttcagggacaggagcggcgaggagcctgaggaaatgcgagcttcccgctttaacgcgggtcgcgaactgcgtcacggtctggaccgaagacgggtgctgcgtgatgatgattttgaagtcgatgaagtgacaggaataagtcctgctagggcacatgtggccgcggccaacctagtatcagcttacgagcagaccgtgaaggaggagcgcaactttcaaaaatctttcaacaaccatgtgcgcaccctgattgcccgcgaggaagtgacactgggactgatgcacctgtgggacctgatggaagccattacccagaaccccaccagcaaacctctaaccgctcagctgtttctggtggtgcaacatagtagagacaatgaggcatttagggaggcgctgttgaacattactgagcccgaggggagatggttgtatgatcttatcaatattctgcaaagtataatagtgcaagaacgtagcctgggtctagctgagaaggtggctgctattaactactcggtcttgagcctgggcaagcactacgctcgcaagatctacaaaaccccatacgtacctatagacaaggaggtgaagatagatgggttttatatgcgcatgactctcaaggtgctgaccttgagtgacgatctgggagtgtaccgcaacgacaggatgcaccgcgcagtgagcgccagcagaaggcgtgagctgagcgacagagaacttatgcacagcttgcaaagagctctgactggggctggaaccgagggggagaactactttgacatgggagcggacttgcaatggcagcccagtcgcagggccctggacgcagcagggtatgagcttccttacatagaagaggtggatgaaggccaggatgaggagggcgagtacctggaagactga

SEQ ID NO: 480 - DNA, 1923 bp, Adenovirus B21
  MISC_FEATURE (1)..(1923): B21.orf00051 E2B terminal protein
atgaactacttcatgccgctgcgcaacatctggaaccgcgtacgcgagttcccgcgggcatccaccaccgcctccggtatcacctggatgtccaggtacatctacggttatcaccgcctcatgctggaagacctcgcccctggcgccccggctacagagcgatggcccctataccgccagccgccgccgcactttcttatcggctaccagtacctggtgcgcacctgtaacgattacatctttgacacccgcgcctactcgcgcctcaagtacaccgagattgtgcgtccggggcaccagacagtcaactggtcagtcatggccaactgctcctacacaatcaacaccggggcttaccaccgcttcgtggactttgacgacttccaagccaccctcacccaggtgcagcaagccatcctcgcagaaagggttgtagcggacctggcacttgtccagcccatgcgcgggttcgggatcactcgcatgcatggcagagcgggcgaagaagaagtgcccgtggaacgactcatgcaagactactataaagatctggccagatgtcaggataatgcttggggaatggcccatcgcctgcgcatccaacaagccggacccaaagacctggtgctcctcgccaccatccgccgtctcaaaactgcctattttaatttcatcaccagcagcatcgtctcaccctccaaagaggaggaaggagaagaaagagagaaccccgaccgagcgtctagccgcccccgcccgcaagaaacagtgctcagcctaccttgcgattgcgactggttagacgctttcgtcgaaaggttttcagatcccgtggatcttgagacgatcaggtccttgcgcggagtacctacggggcaattgataaaatgcataatcagcgcggtgtccctgcccaacggagagcctcccagtcaccacttcagggagatgcgcggaggcgtcttcactctgagacccagggagaacggtcgtgccgtcaccgagaccatgcgccgccgccgcggagaggtcattgaaagattcatcgaccgtctgcccgtgcgccgccggcgtcgccgcgttccccctcctcctgcagccccacctgaagaggaagagatgttagtggaagaagaagagattgaggaagaaatcccaggggctttcgagcgcgaggtgcgcaccaccgtcgccgaactcatccgtcttctggaagaggagttgaccgtgtccgcgcgtaactcccagtttttcaactttgccgtggacttctacgaggccatggagcgcttggaagcgctgggcgatgtcagcgagatgccgctgagacgatggatcatgtatttcttcgtcaccgagcacatcgccaccacactcaactaccttttccagcgtctatgcaactatgcggtcttcacccgccacgtggagctcaacctcgcccaggtggtcatgcgcgcgagagatcccgtgggggctgtggtctacagccgcgtctggaacgaggcgggcatgaatgcattctctcaactcattgggcgcatctccaacgacctggcggccaccgtcgagagagcgggccgcggagatcttcaagaggaagagatcgagcagttcatggccgagatcgcctaccaggacaactctggcgacgtgcaagaaatccttaggcaagccgccgtcaacgataccgagattgattctgttgaactctctttcaggttcaagctcacggggccggtagctttcacccagaggcgtcagatccaggatgtcaaccgccgcgtcgtcgcgcatgcgagtcttctcagagcacagtaccagaacctacccgcgcgcggcgccgacgtaccactgccagccatgccgccgggtcccgaaccgcccctgccgcccggtgcgcgccctcgacaccgcttctaa

SEQ ID NO: 481 - DNA, 3369 bp, Adenovirus B21
  MISC_FEATURE (1)..(3369): B21.orf00052 E2B DNA polymerase
atgcaagaagcaacagagccaccgccgcccaaaaggaaaaacaagggcacggtggtagcacccaaggggcacggaaccctgcaagccatcgacatctccaccaacggacccgtggagatcaagtaccatctgaacctccctcacgccctcgaaaagatcatgcaagtcaatctcctgacactgcctactaacctgactccgcagcgtctcaggaccctggacagctccggcctgcgcgctctcgtcctcgagctccgcccctgccgcgccgaggtctggacttgcctcccgcgagggctcgtcagcatgaccaccatcgagacagaagatggtcatgccgatgcagacaacatagtagagcgcgaggtacaaacgccaggcctcaattttccactgaaatttctcgtcaaaggaagtcaggtacaactcattcatgaggtgcatcccgtgaatcgctgcgagtactgcggccgtctgtacaagcacaagcatgaatgctcggcgcgtcgcagggagttctacttccatcacatcaacagccattcctccaactggtggcaggagatccagttcttcccgattggctctcatcctcgcacagaaaggctcttcctcacctacgatgtggaaacctacacctggatggggtcctttggcaagcagctaatccccttcatgctggtcatgaaactctctggagaccagcggctcgtcaacatcgcctatgacctcgccatgaaactcaagtgggatcgctggcggcaggacccccaaaccttctattgcgtcaccccagaaaagatggcagtcgggcagcattttcgtcagtaccgggaccagttacaaacagcactggcagtggacctctggtcctccttcctcaaagcgaaccctcacgtgcacgaatgggccctcgaacactatgctctcactgaccctacagatctcacttttgaagaactcaagaagctgcctcatgtcaggggcacccctcgattcttagaactgtacatagtggggcacaacatcaatggctttgatgagatcgtcttggccgctcaggttatcaataaccgagcagaggtccctcagcctttcaaaatcacccgaaatttcatgcccagggccggcaagatcctcttcaatgatgttactttcgctttgcccaaccccgcctacaagaagcgggtggacttccaactctgggaacagggggcctgtgatgacattgacttcaagtatcaattcctcaaagtcatggtcagggacacttttgccctcactcatacctcgctgcgcaatgcagcccaagcatactctcttccagtggagaagggatgctgtccctacaaggcagtcaatcagttctacatgttgggctcttaccgtgcagaaaaagacgggtttcccctcgaagagtactggaaggatcgcgaagaataccttctcaaccgcgagctgtgggaaaagaaaagccaaccgcgttatgacatcatccaggaaactctcgactactgtgccctggatgtactcgtcaccgccgagctggtagccaagctgcaagagtcatatgcccacttcataagggactctgtaggcctacctcatgcccattttaacatattccagagacctactatctcttccaattcccatgccatctttcgccagatcgtttacagggcggaaaaacccaaccgcaccaatctgggcccgggtcttctcgccccctcacatgaactctatgactatgtgcgagcaagcatcagaggggggcgctgttatcccacttacatcggcatcctcgaagagcccctctatgtctacgatatctgtggcatgtatgcctccgcgctcacccaccccatgccctggggcacccctcttaacccctatgagcgcgcgctggcagttcgagaatggcagatgaccttggatgatcccgccaccatcagctattttgacaaagatttgctaccgggaatatttaccatagatgcggacccccctgatgagttcatgctagaccccctcccacctttctgttcaagaaaaggaggtcgactctgctggaccaatgagcccctccgaggcgaggtggccaccagtgtggatctgataaccctgcacaataggggatggcgagtcagaatagttccggatgaactgacaaccatcttccctgaatggaaatgtgtggcgcgcgagtacgtccagcttaacatcgccgccaaggagcgcgcggacaaggaaaagaaccaaaccatgcgctccatcgccaagcttctgtccaatgccctttatggatcatttgccaccaagctggacaacaagaagattgtgttttctgaccagatggacgagagtcttatgaaaggcgtctctgctggtactgtcaatatcaaatcctcctcgttcctagaaactgacaacctgagtgcagaggtcatgcccgccttcgagagggaatacctaccccaacagctggcgctcctggacagcgatcctgaagacagtgaggacgaacagaggcccgcccccttttatacccccccggcggggacccctggtcacgtggcctacacttacaagccaatcacattcttggatgtggaggagggggacatgtgtttacataccgtagagaaggtggacccactggttgacaacgaccgctacccctcccacgtggcctcctttgtgctggcctggacacgcgcttttgtatcagagtgggctgggttcctctacgaagaggaccgaggcactccgctcgaggacaggcccataaagtcggtctacggggacacggacagcctctttgtcacccagcggggacacgaactcatggaaaccaaaggtaagaaacgcatcaaaaaacatggcggaaaacttgtttttgaccccgatgagccggatctgacctggctcgtggagtgcgaaaccgtctgcgcctcctgcggtgcggatgcatactcccccgaatccattttcctcgcgcccaagctgtatgccctcaaatgtatctactgccccgcctgccataaaacttccaaaggtaagctccgtgccaaaggccacgcggccgaggcgctcaactacgaactcatggtaaactgctacctggccgacctgcagggcgccgatcggcagcggttctcgaccagcaggatgagtctgaagcgcaccctcgcaagcgcccaaccaggcgcgcaccccttcaccgtgacggaaacaaccctgactcggacgctgcgaccatggaaggatcggaccctagcagcgctggacgcccatcgtctgattccctactccaggagccgtcccaacccgcgaaacgaggaggtctgttggatcgagatgccatag

SEQ ID NO: 482 - DNA, 1047 bp, Adenovirus B21
  MISC_FEATURE (1)..(1049): B21.orf00053 IVa2 protein IVa2
atgcccatggctgacgggctgaagccgctgaaaaacttctcctcgctccaggagcttctatcccttgggggagagcgcctcctaacggacttggtgcgggaaaatatccatgtaagggaaatgatgaacgaagtggcccccctgctccgggaggacggcagctgtcgctccctaaactaccatctgcaacccgtaattggggtcatttacggtcccactgggtgcggcaagtctcagctgcttaggaatttgctctcatcccagttaatcaccccggctccagaaacggtattttttatagccccgcaggtggacatgatccccccctcggaactgaaagcctgggaaatgcaaatatgtgagggaaactatgctcccgggccagagggaactttcatcccccaatctggcaccctccgcccaaagtttattaaaatggcttatgatgacctgactcaggagcataactatgatgtttcagacccccggaacgtgttcgcccgtgccgctgcccacggccccatcgctatcattatggatgagtgcatggagaatctggggggtcacaaaggcgtctccaaattttttcatgcttttccctctaagctgcatgataaatttcccaagtgcaccggatacactgtcttggtggttctgcacaatatgaatccgagacgggatctaggcggcaacattgccaacctcaagatccagtccaaaatgcatataatttcacccaggatgcacccgtcccagctcaacagatttgtaaacacctacactaagggcctccccgttgcaattagtctgctcctaaaagatattgtgcaacaccatgcactccgaccttgctatgactgggtgatttataacactaccccggagcaagaggctcttcaatggagctatctccacccccgagacggactaatgcccatgtatctaaacattcaatcccacctttacagggtactggaaaagatccaccgagttctcaatgatcgagaccgatggtccagggcataccgcgcgcgaaaaatcaaataa

SEQ ID NO: 483 - DNA, 417 bp, Adenovirus B21
  MISC_FEATURE (1)..(417): B21.orf00055 IX hexon associated protein IX
atgagtggaagcgcttcttttgaggggggagtatttagcccttatctgacgggcaggctcccatcatgggcaggagttcgtcagaatgtcatgggatccactgtggatgggagacccgtccagcccgccaattcctcaacgctgacctatgccactttgagttcgtcatcattggatgcagctgcagccgccgccgctactgctgccgccaacaccatccttggaatgggctattacggaagcatcgttgccaattccagttcctctaataacccttcaaccctggctgaggacaagctgcttgttctcttggctcagctcgaggccttaacccaacgcttaggcgaactgtctaagcaggtggcccagttgcgtgagcaaactgagtctgctgttgccacagcaaagtctaaataa

SEQ ID NO: 484 - DNA, 1479 bp, Adenovirus B21
  MISC_FEATURE (1)..(1479): B21.orf00056 E1B large T antigen
atggatccgccaaacccacttcagcaagggatacgttttggatttcatagcagcagctttgtggagaacatggaaggctcgcaggatgaggacaatcttagattactggccagtgcagcctctgggagtagcagggatactgagacacccaccggccatgccagcggttctggaggaggagcagcaggaggacaatccgagagccggcctggaccctccggtggaggagtagctgacctgtttcctgaactgcgacgggtgcttactaggtctacgtccagtggacaggacaggggcattaagagggagaggaatcctagtgggaataattcaagaaccgagttggctttaagtttaatgagccgtaggcgtcctgaaactgtttggtggcatgaggttcagagcgaaggcagggatgaagtttcaatattgcaggagaaatattcactagaacaacttaagacctgttggttggaacctgaggatgattgggaggtggccattaggaattatgctaagatatctctgaggcctgataaacagtatagaattactaagaagattaatattagaaatgcatgctacatatcagggaatggggcagaggttataatagatacccaagataaagcagcttttagatgttgtatgatgggtatgtggccaggggttgtcggcatggaagcagtaacatttatgaatattaggtttaaaggggatgggtataatggcattgtatttatggctaacactaagctgattctacatggttgtagcttttttgggtttaataatacttgtgtagaagcttgggggcaagttggtgtgaggggttgtagtttttatgcatgctggattgcaacatcaggtagggtcaagagtcagttgtctgtgaagaaatgcatgtttgagagatgtaatcttggcatactgaatgaaggtgaagcaagggtccgccactgcgcagctacagaaactggctgcttcattctaataaagggaaatgccagtgtgaagcataatatgatctgtggacattcgaatgagaggccttatcagatgctgacctgcgctggtggacattgcaatattcttgctaccgtgcatatcgtttcccatgcacgcaagaaatggcctgtatttgaacataatgtgattaccaagtgcaccatgcacataggtggtcgcaggggaatgtttatgccttaccagtgtaacatgaatcatgtgaaggtgatgttggaaccagatgccttttccagagtgagcttaacaggaatctttgatatgaatattcaactatggaagatcctgagatatgatgacactaaaccgagggtgcgcgcatgcgaatgcggaggcaagcatgctagattccagccggtgtgcgtggatgtgactgaagacctgagacccgatcatttggtgcttgcctgcactggagcggagttcggttctagtggtgaagaaactgactaa

SEQ ID NO: 485 - DNA, 174 bp, Artificial Sequence
  B21.orf00058 hypothetical protein
atggcagcaggttgctatgagctaaccacacagatctgctcctacttatatatccaagtccccacccaagaagcaataaaacactcagcagctgacataattttattacatgacgtcacattaaataaacacagctgcagggcactcattgtcttggcagtttccgggtactaa

SEQ ID NO: 486 - DNA, 243 bp, Adenovirus B21
  MISC_FEATURE (1)..(243): B21.orf00060 E1A 28.4 kDa protein
atggtagatttatgtttttacttgcgattttttgtaggtcctgtgtctgatgatgaggcgccttctcctgattcaactacctcacctcctgaaattcaggcgcccgtacctgcaaacgtatgcaagcccattcctgtgaagcctaagtgtgggaaacgccctgctgtggataagcttgaggacttgttggagggtggggatggacctttggaccttagtacccggaaactgccaagacaatga

SEQ ID NO: 487 - DNA, 594 bp, Adenovirus B21
  MISC_FEATURE (1)..(594): B21.orf00062 E1A 28.4 kDa protein
atgagacacctgcgattcctgccacaggagattatctccagcgagaccgggatcgaaatactggagtttgtggtaaataccctgatgggagatgacccggaaccgccagtgcagcctttcgatccacctacgctgcacgatctgtatgatttagaggtagacgggcctgatgatcccaatgaggaagctgtaaatgggttttttactgattctatgctgctagctgccgatgaaggattggacataaaccctcctcctgggacccttgataccccaggggtggttgtggaaagcggcagaggtgggaaaaaattgcctgatctgggagcagctgaaatggacttgcgttgttatgaagagggttttcctccgagtgatgatgaagatggggaaactgaacagtccatccataccgcagtgaatgagggagtaaaagctgccagcgatgtttttaagttggactgtccggagctgcctggacatggctgtaagtcttgtgaatttcacaggaataacactggaatgaaagaactattgtgctcgctttgctatatgagaatgcactgccactttatttacagtaagtgtatttaa

SEQ ID NO: 488 - DNA, 378 bp, Adenovirus B50
  MISC_FEATURE (1)..(378): B50.orf00001 E4 ORF1 protein
atggctgatgaggctttgtatgtgtatttagatggaccgggggcgacgttgcctgaacagcagcagagaaataattatattttttattctcctgtgccttttactttgtatccgcgaggggtggctttgctatacttaagattaagcataattatacccagaggctatgttggctgttttttctctttaactgatgctaacatgtctggattatatgcttcatcaagaattattcatgctggccaccgcgaggaactttcggtgctgttgtttaatcacgatgacaggttttacgagggtcgagctggagaccctgtggcttgtcttgtgatggaaagactgatttatccacctgttcgacaggctactatgatatga

SEQ ID NO: 489 - DNA, 435 bp, Adenovirus B50
  MISC_FEATURE (1)..(435): B50.orf00002 E4 ORF2 protein
atgacgcttgtttcttttattttgcagactaattcaaaactaacaatgttggagcgcagcgcggtaacctattgcatttgcatcccagagattttgaatgtttctttggaaaatttttcttttattcaatttttacaagaaattctgcctgattatatttccagcaactttgatgatattactggtggttcccagtatgcttattctaatcttgtttttgctggagccaattggggaggtctgcgcttgtactgcactgtagcgtcccctgctattgttcccggggggcttttggctaagcagtttggtgataatatgagagagtatttacaactagaacttagagaagaacttagagccaagggcatgtcaattgatgatgccattcttaatttgctacaggtgacacaggagcaagatattttgtcattatga

SEQ ID NO: 490 - DNA, 336 bp, Adenovirus B50; identical to SEQ ID NO: 338
  MISC_FEATURE (1)..(336): B50.orf00003 E4 ORF3 protein

SEQ ID NO: 491 - DNA, 900 bp, Adenovirus B50
  MISC_FEATURE (1)..(900): B50.orf00008 E4 ORF6 protein
atgtcaggaaacaactccattatgacaaggttgcgcgcacgctcgacatcatgcgccagacatcacccttacaccagagcccagttaccacgatgtgaggaaaatgaaacccgagcttctatgactgaagaccacccgctgttgccagattgtgatactatgactatgcatagtgtaagttgtgttcgtggtcttccttgttctgccagctttactgttttgcaagagtttcccattccttgggatatgtttttaaatccagatgagttaaaaattatgagaagatgcatgcatttatgtctttgttgtgctactatagatatttttcagtctcaagtgattcatggtcgagagaattgggttcttcattgtcattgtaatcagcagggttcacttcaatgcatggctgggggagcggtgttggcagtgtggttccggaaggttatattgggttgcatgattaaccaacgttgtccatggtacagacagattgttaatatgcacatgccaaaagagatcatgtatgtgggtagtgtgtttttgagggaacgacatttaatttatattaaaatttggtatgatggtcatgcaggggcgattgtatcagatatgagttttggctggagcgcttttaattatggtttattaaacaatattgtgataatgtgctgtacatactgtagtaatctcagtgaaatcagaatgcgttgctgcgcgcatcgcaccagaaagttaatgttaagggctattaaaatcatgcttcaggacactgcagaccccgatcccataaacagcagtcgcacggagcgacgcagacagcggctgcttgtgggtttgatgagacacaatcgcccgattccgttttcggattatgattcccatcgttcttcttccagatga

SEQ ID NO: 492 - DNA, 252 bp, Adenovirus B50; identical to SEQ ID NO: 454
  MISC_FEATURE (1)..(252): B50.orf00009 E4 ORF6/7 protein

SEQ ID NO: 493 - DNA, 972 bp, Adenovirus B50; identical to SEQ ID NO: 136
  MISC_FEATURE (1)..(972): B50.orf00011 L5 fiber protein

SEQ ID NO: 494 - DNA, 165 bp, Adenovirus B50
  MISC_FEATURE (1)..(165): B50.orf00012 U protein
atgaagatcgtgggtacaggagaggagctaaaatttgacatcccctttaaagtatggagaaagtatgccgctgaacggggtttagaataccagagttgggaagagggaagcgaggtgctgctgggaaaaaatttcaacagagaccttattgctgatttcaagtaa

SEQ ID NO: 495 - DNA, 408 bp, Adenovirus B50
  MISC_FEATURE (1)..(408): B50.orf00015 E3 15 kDa protein
atgactgaaatactcaccacctccaattccgccgaggatctgcttgatatggacggccgcgcctcagaacagcgactcgcccaactacgcatccgccagcagcaggaacgcgtgaccaaagagctcagagatgtcatccaaattcaccaatgcaaaaaaggcatattttgtttggtaaaacaagccaagatatcctacgagatcaccgctactgaccatcgcctctcttacgaacttggcccccaacgacaaaaatttacatgcatggtgggaatcaaccctatagttatcacccagcaaagtggagatactaagggttgcattcactgctcttgcgattccaccgagtgcacctacaccctgctgaagaccctatgcggcctaagagacctgctacccatgaattaa

SEQ ID NO: 496 - DNA, 438 bp, Adenovirus B50
  MISC_FEATURE (1)..(438): B50.orf00017 E3 14.9 kDa protein
atgttgcggcacttcttaggcttatttaaaaccatgcaggctatgctaccagttattttaattctgctactaccctgcattgccctaccttccaccgccactcgcgctacacctgaacaacttagaaaatgcaaatttcaacaaccatggtcatttcttgattgctaccatgaaaaatctgattttcccacatactggatagtgattgttggaataattaacatactttcatgtacctttttctcaatcacaatataccccacatttaattttgggtggaattctcccaatgcactgggttacccacaagagctagatgaacatatcccactacaacacatacaacaaccactagcattggtagagtatgaaaatgagccacaaccttcactgcctcctgctattagttacttcaacctaaccggcggagatgactga

SEQ ID NO: 497 - DNA, 276 bp, Adenovirus B50; identical to SEQ ID NO: 459
  MISC_FEATURE (1)..(276): B50.orf00019 E3 10.3 kDa protein

SEQ ID NO: 498 - DNA, 285 bp, Adenovirus B50
  MISC_FEATURE (1)..(285): B50.orf00021 E3 11 kDa protein
atgatattgtttcaatccaatgccactaacactatcaatgtgcagactactttaaaacatgacatggaaaaccacactacctcctatgcatacacaaatattcagcctaaatacgctatgcaactagaaatcaccatactaattgtaattggaattcttatactatctgttattctttattttatattctgccgtcaaatacccaatgttcatagaaattctaaaagacgtcccatctattctcctatgattagtcgtccccatatggctctgaatgaaatctaa

SEQ ID NO: 499 - DNA, 570 bp, Adenovirus B50; identical to SEQ ID NO: 461
  MISC_FEATURE (1)..(570): B50.orf00023 E3 20.8 kDa protein

SEQ ID NO: 500 - DNA, 540 bp, Adenovirus B50
  MISC_FEATURE (1)..(540): B50.orf00024 E3 20.1 kDa protein
atggcttctgttacagctctaattattgccagcattgtcactgtcgctcacgggcaaacaattgtccatattaccttaggacataatcacactcttgtagggcccccaattacttcagaggttatttggaccaaacttggaagtgttgattattttgatataatttgcaacaaaactgaaccaatatttgtaatctgtaacagacaaaatctcacgttaattaatgttagcaaaatttataacggttactattatggttatgatagatccagtagccaatataaaaattacttagttcgcataactcagcccaaatcaacagtgccaactatgacaataattaaaatggctaataaagcattagaaaattttacattaccaacaacgcccaatgaaaaaaacattccaaattcaatgattgcaattattgcggcggtggcattgggaatggcactaataataatatgcatgttcctatatgcttgttgctataaaaagtttcaacataaacaggatccactactaaattttaacatttaa

SEQ ID NO: 501 - DNA, 519 bp, Adenovirus B50
  MISC_FEATURE (1)..(519): B50.orf00025 E3 18.4 kDa protein
atgggggccatactagtcgtgcttgctttactttcgcttttgggtctgggctctgctaatctcaatcctcttgatcacaatccatgtctagacttcgacccagaaaattgcacacttacttttgcacccgacacaagccgtctctgtggagttcttattaagtgcggatgggactgcaggtccgttgaaattacacataataacaaaacatggaacaataccttatccaccacatgggagccaggagttcccgagtggtatactgtctctgtccgaggtcctgacggttccattcgcattagtaacaacactttcattttttctgaaatgtgcgatctggccatgtttatgagcaaacagtatgacctatggcctcctagcaaagagaacattgtggcattttccattgcttattgcttggtaacatgcatcatcactgctatcatttgtgtgtgcatacacttgcttatagttattcgccctagacaaagcaatgaggaaaaagagaaaatgccttaa

SEQ ID NO: 502 - DNA, 321 bp, Adenovirus B50
  MISC_FEATURE (1)..(321): B50.orf00028 E3 11.7 kDa protein
atgtctaatggtggcgcggctgagctagctcgactgcgacacctagaccactgccgccgctttcgctgtttcgcccgggaactcaccgagttcatctacttcgaactctccgaggagcaccctcagggtccggcccacggagtgcggattaccatcgaagggggaatagactctcgcctgcatcgcatcttctcccagcggcccgtgctgattgagcgcgaccagggaaatacaaccatctccatctactgcatctgtaaccaccccggattgcatgaaagcctttgctgtcttgtttgtgctgagtttaataaaaactga

SEQ ID NO: 503 - DNA, 684 bp, Adenovirus B50
  MISC_FEATURE (1)..(684): B50.orf00029 L4 protein VIII
atgagtaaagagattcccacgccttacatgtggagctatcagccccaaatggggttggcagcaggtgcttcccaggactactccacccgcatgaattggcttagcgccgggccctcaatgatatcacgggttaatgatatacgagcttatcgaaaccagttactcctagaacagtcagctcttaccaccacaccccgccaacaccttaatccccgaaattggcccgccgccctggtgtaccaggaaaatcccgctcccaccaccgtactacttcctcgagacgcccaggccgaagttcagatgactaacgcaggtgtacagctggcgggcggttccgccctatgtcgtcaccggcctcaacagagtataaaacgcctggtgatcagaggccgaggtatccagctcaacgacgagtcggttagctcttcgcttggtctgcgaccagacggagtcttccagatcgccggctgtgggagatcttccttcactcctcgtcaggctgtgctgactttggagagttcgtcctcgcagccccgctcgggcggcatcggaactctccagtttgtggaggagtttactccctctgtctacttcaaccccttctccggctctcctggccagtacccggacgagttcataccgaacttcgacgcaatcagcgagtcagtggatggctatgattga

SEQ ID NO: 504 - DNA, 297 bp, Adenovirus B50
  MISC_FEATURE (1)..(297): B50.orf00030 L4 33 kDa protein
gtgaccagaaaagcagcagttagaaaatccacaacaagtgcagcaggaggaggactgaggatcacagcgaacgagccagcgcagaccagagagctgaggaaccggatctttccaaccctctatgccatcttccagcagagtcgggggcaagagcaggaattgaaagtaaaaaaccgatctctgcgctcgctcaccagaagttgtttgtatcacaagagcgaagaccaacttcagcgcactctcgaggacgccgaggctctcttcaacaagtactgcgcgctgactcttaaagagtag

SEQ ID NO: 505 - DNA, 129 bp, Adenovirus B50
  MISC_FEATURE (1)..(129): B50.orf00031 L4 22 kDa protein
gtgaacttcccccgcaatatcttgcattactaccgtcacctccacagcccctactgcagtcagcaagtcccggcaaccccgacagaaaaagacagcagcgacaacggtgaccagaaaagcagcagttag

SEQ ID NO: 506 - DNA, 2472 bp, Adenovirus B50
  MISC_FEATURE (1)..(2472): B50.orf00032 L4 100 kDa hexon-assembly associated protein
atggaaactcagccatcactgccaacatcgctgcaagcgccatcacacctcgcccccagcagcgacgaggaggagagcttaaccaccccaccacccagtcccgctaccaccacctctaccctcgatgatgaggaggaggtcgacgcagcccaggagatgcaggcgcaggataatgtgaaagcggaagagattgaggcagatgtcgagcaggacccgggctatgtgacaccggcggagcacgaggaggagctgaaacgttttctagacagagaggatgacgaccgcccagagcatcaccaggaggctggcctcggggatcatgttgccgactacctctccgggcttgggagggaggacgtgctcctcaaacatctagcaaggcagtcgatcatagttaaagacgcactactcaacctcaccgaagtgcctatcagtgtggaagagcttagccgcgcctacgagctgaacctcttttcgcctcagataccccccaagcggcagcgaaacggcacctgcgaggccaaccctcgactcaacttctatccagcttttactgtccccgaagtgctggccacctaccacatcttttttaagaaccaaaagattccagtctcctgccgcgccaaccgcacccgcgcagatgcccttctcaacttgggtccgggagctcgcttacctgatatagcttccttggaagaggttccaaagatctttgagggtctgggaagtgatgagactcgggccgcaaatgctctgcaacagggagagaatggtatggatgaacatcacagcgctctagtggaactggagggtgacaatgcccggcttgcagtgctcaagcgcagtatcgtggtcacccattttgcctaccccgctgttaacctgccgcccaaagtcatgagcgctgtcatggaccatctgctcatcaaacgagcaagtccactttcagaaaaccagaacatgcaggatccagacgcctcggaggagggcaagccggtagtcagtgacgagcagctatctcgctggctgggtaccaactccccccgagatttggaagaaagacgcaagcttatgatggctgtagtgctagtaactgttgagttggagtgtctgcgccgcttttttaccgaccccgagaccctgcgcaagctagaggagaacctgcactacaccttcagacatggcttcgtgcgccaggcatgcaagatctccaacgtggagctcaccaacctggtttcatacatgggcattttgcatgagaaccggctagggcagagcgttctgcacaccaccctgaagggggaggcccgccgcgactacatccgagactgtgtctacctctacctctgccatacctggcagactggtatgggtgtgtggcaacagtgtttggaagagcagaaccttaaagagctggacaagctcttgcagagatccctcaaagccctgtggacaggttttgacgagcgcaccgtcgcctcggacctggcggacatcatcttccccgagcgtcttagggttactctgcgaaacggcctgccagacttcatgagccagagcatgcttaacaactttcgctctttcatcctggaacgctccggtatcctgcctgccacctgctgtgcgctgccctccgactttgtgcctctcacctaccgcgagtgcccaccgccgctatggagccactgctacctattccgcctggccaactacctctcctaccactcggatgtgatagaggatgtgagcggagacggcctgctggaatgccactgccgatgcaatttatgcacaccccaccgctccctcgcctgcaacccccagttgctaagcgagacccagatcatcggcaccttcgagttgcagggtcccaacagtgaaggcgaggggtcttctccggggcagagtctgaaactgacaccggggctgtggacctccgcctacctgcgcaagtttcatcccgaggactatcatccctatgagatcaggttctatgaggaccagtcacatcctcccaaagtcgagctctcagcctgcgtcatcacccagggggcaattctggcccaattgcaagccatccaaaaatcccgccaagaatttctgctgaaaaagggaagcggggtctaccttgacccccagaccggtgaggagctcaacacaaggttcccccaggatgtcccatcgccgaggaagcaagaagctgaaggtgcagctgtcacccccagaggatatggaggaagactgggacagtcaggcagaggaggagatggaagattgggacagccaggcagaggaggtggacagcctggaggaagacagtttggaggaggaagacgaggaggcagaggaggtggaagaagcaaccgccgccaaacagttgtcatcggcggcggagacaagcaagtccccagacagcagcacggctaccatctccgctccgggtcggggggcccagcggcggcccaacagtag

SEQ ID NO: 507 - DNA, 1554 bp, Adenovirus B50
  MISC_FEATURE (1)..(1554): B50.orf00034 E2A DNA binding protein
atggccagccgcggaggaaatcagtcaagcgaccgccaacgggagcacacccccgaacgcggaatgggctctgccagccatccgcctccaaggccggaccgcagcccatctcagtcgcctccacctctgcccccgaagaggaacacctaccgtcgcgtggggtccgattcttctatcgagagccaggtggtactggtaagcgaaacttcgcggtcatccctgtctccggaacggagcaacagtcctcccccgatccctcccaagaagaagcccaggaagaccaagcatgtccctctgcaagacatcagccaggacagcgaagaagaaagagaacaggctcagttggtggccgtgggcttcagctaccccccggtgcgcatcattgagaaggatggcaagagaagtgttgagaagatcgacaagaatgaccctatagctaaaggagctacttctattgctgttaggaatcctttgagcttgcccctggtatctgcctgggagaagggcatggaagtgatggctgtgctaatggagaggtataggctggataatgacctgagaacctctttcaagctgatgccagagcagcacgagcagtacaagcgtatctgccaccagtatgtgaacgaggagcaccgtggcatcccgctgacatttagtagcatgaagaccctgacagcgatgatgggaagattcatgcagggattggtgcattcttattctgagatcgcccacaataattgggagtgcaccgggtgcgctctgtgggctcatggatgcaccgattacgaaggcaaggtgaaatgcctgcatggcactatcatgatccagaaggaccacattatcgagatggatgtggcgagcgaaaacgggcagcgcgctatgaaggagaacccagacagagccaagatcacccagaaccgctggggcagaaatgtggtccagttggccaacaacgatgcccgctgctgtgtgaatgatgccaactgtgctactaaccaattttccagcaagtcctgtgggatgttttacaccgagggaagtaaggctcaggaagctttcaagcagtacgaagccttcatgaaggccgtgtacccagggataacccccgaccaagccaggatgatgctgatccccattcattgcgattgcaaccacaagccaggctgcgctcccgtgatgggcaggcagacctgtaagatgaccccctttggaatggccaatgctgaagacttggatgtgactaccatcagtgacccgaccgtgctggcaagcgtgagacacccagccttgatggtgttccagtgttgcaacccagtgtaccgcaactcccgtgtccagaatgccggccccaactgtgatttcaagatctctgctcctgacctgcttggcgccctgcaactgaccagaaagttgtggcaagacacctttcccgaaattccagttcccaagctggtgatccccgagttcaagtggcagaacaggttacagttccgcaacgtctccctgcccacgggtcactctgactcccgccagaacccatttgatttctga

SEQ ID NO: 508 - DNA, 630 bp, Adenovirus B50
  MISC_FEATURE (1)..(630): B50.orf00036 L3 23 kDa protein
atgtcatgcgggtccggaaacggctccagcgagcaagagctcaaagccatcgtccgagacctgggctgcggaccctatttcctgggaacctttgacaagcgtttcccggggttcatggcccccgacaagctcgcctgcgccatagtcaacactgccggacgcgagacggggggagagcactggctggcttttggttggaacccgcgctccaacacctgctacctttttgatccttttgggttctcggatgagcgactcaaacagatttaccagtttgagtacgaggggctcctgcgccgcagtgcccttgctaccaaagaccgctgcatcaccctggaaaagtccacccagagcgtgcagggcccgcgctcagccgcctgtggacttttttgctgtatgttccttcatgcctttgtgcactggcccgaccgccccatgaacggaaaccccaccatgaagttgctgactggggtgtcaaacagcatgctccaatcaccccaagtccagcccaccctgcgccgcaaccaggaggcgctatatcgcttcctaaacacccactcatcttactttcgttctcaccgcgcacgcattgaaagggccaccgcgtttgaccgtatggatatgcaataa

SEQ ID NO: 509 - DNA, 2787 bp, Adenovirus B50; identical to SEQ ID NO: 196
  MISC_FEATURE (1)..(2787): B50.orf00038 L3 hexon protein

SEQ ID NO: 510 - DNA, 141 bp, Adenovirus B50
  MISC_FEATURE (1)..(141): B50.orf00039 L3 hexon
atgtatgcccactggggcagcatcgatggggtggccatcttgaaatcaactcagcctcggcgcgcgacctcttccttgctcctctgctgttgctgcggcggcggcgtgatgatgacacatacacacagacaggcaagttaa

SEQ ID NO: 511 - DNA, 750 bp, Adenovirus B50
  MISC_FEATURE (1)..(750): B50.orf00041 L3 protein VI
atggaagacatcaatttttcatccctggctccgcgacacggcacgaggccgtacatgggcacctggagcgacatcggcaccagccaactgaacgggggcgccttcaattggagcagtatctggagcgggcttaaaaattttggctctaccataaaaacctatgggaacaaagcttggaacagcagcacagggcaggcattgaaaaataagcttaaagagcaaaacttccaacagaaggtggttgatggaatcgcctctggtatcaatggggtggtggatctggccaaccaggccgtgcagaaacagataaacagccgccttgacccgccgccgtcagcccctggtgaaatggaagtggaggaagatctccctccccttgaaaagcggggcgacaagcgtccgcgccccgatctggaggagacactagtcacacgctcagacgacccgccctcctacgaggaggcagtgaagcttggaatgcccaccaccagacctgtagcccccatggctaccggggtaatgaaaccttctcagtcacaccgacccgctaccttggacttgcctccccctgctgttgcagcgcctgctcgcaagcctgtcgctaccccgaagcccaccaccgtacagcccgtcgccgtagccagaccgcgtcctgggggcactccacgtccgaatgcaaactggcagagtactctgaacagcatcgtgggtctgggcgtgcaaagtgtaaagcgccgtcgctgcttttaa

SEQ ID NO: 512 - DNA, 231 bp, Adenovirus B50; identical to SEQ ID NO: 474
  MISC_FEATURE (1)..(231): B50.orf00042 L2 protein X

SEQ ID NO: 513 - DNA, 1062 bp, Adenovirus B50
  MISC_FEATURE (1)..(1062): B50.orf00043 L2 protein V
atgtccaagcgcaaatacaaggaagagatgctccaggtcatcgcgcctgaaatctacggtccgccggtgaaggatgaaaaaaagccccgcaaaatcaagcgggtcaaaaaggacaaaaaggaagaagatggcaatgatggtctggcggagtttgtacgcgagttcgccccaaggcggcgagtgcagtggcgtggacgcaaagtgcagcctgtgctgagacctggaaccacggtggtctttacgcccggcgagcgctccagcactgcttttaagcggtcctatgatgaggtgtatggggatgatgatattctggagcaggcggccgaccgcctgggcgagtttgcttatggcaagcgctcccgctcgagccccaaggaggaggcggtgtccattcccttggacaatgggaatcccacccctagtctcaagccagtcaccctgcagcaagtgctgcccgtgcctccacgcagaggcaacaagcgagagggtgaggatctgtatcccactatgcaattgatggtgcccaagcgccagcggctggaggacgtgctggagaaaatgaaagtggatcccgatatacaacctgaggtcaaagtgagacccatcaagcaggtggcgccaggtttgggagtacaaaccgtagacatcaagattcccaccgagtcaatggaagtccaaaccgaacctgcaaagcccacaaccacctccattgaggtgcaaacggatccctggatgaccgcacccgttacaactccagctgctgtcaacaccactcgaagatcccggcgaaagtacggtccagcaagtttgctgatgccaaattatgctctgcacccatccattattccaactccgggttaccgaggcactcgctactaccgcagcaggagcagcacttcccgccgtcgccgcaaaacacctgcaagtcgtagtcatcgtcgtcgccgccgccccaccagcaatctgactcccgctgctctggtgcggagagtgtatcgcgatggccgcgcggatcccctgacgttaccgcgcgtacgctaccatccaagcatcacaacttaa

SEQ ID NO: 514 - DNA, 579 bp, Adenovirus B50
  MISC_FEATURE (1)..(579): B50.orf00045 L2 protein VII
atgtccattcttatctcacctagtaataacaccggttggggcctgcgcgcgccaagcaagatgtacggaggtgctcgcaaacgctctacacagcaccctgtgcgcgtgcgcgggcacttccgcgctccatggggcgccctcaagggtcgtacccgcactagaaccaccgtcgatgatgtgatcgaccaggtggtggccgatgctcgtaattatactcctactgcacctacatctactgtggatgcagttattgacagcgtagtggctgacgcccgcgcctatgctcgccggaagagcaggcggagacgcatcgccaggcgccaccgggctactcccgctatgcgagcggcaagagctctgctgaggagggccaaacgcgtggggcgaagagctatgcttagagcggccagacgcgcggcttcaggtgccagtgccggcaggtcccgcaggcgcgcagccacggcggcagcagcggccattgccaacatggcccaaccgcgaagaggcaatgtgtactgggtgcgcgacgccaccaccggccagcgcgtgcccgtgcgcacccgcccccctcgctcttag

SEQ ID NO: 515 - DNA, 1686 bp, Adenovirus B50; identical to SEQ ID NO: 168
  MISC_FEATURE (1)..(1686): B50.orf00046 L2 penton protein

SEQ ID NO: 516 - DNA, 1761 bp, Adenovirus B50
  MISC_FEATURE (1)..(1761): B50.orf00047 L1 protein IIIa
atggaacagcaggcaccggaccccgcaaaacgggcggcgctacagagccagccgtccggcattaactcctcggacgattggagccaggccatgcaacgcatcatggcgctgacgacccgcaaccccgaagcctttagacagcaaccccaggccaaccgcctttctgccatcctggaggccgtagtgccctcccgctccaaccccacacacgagaaggtcctggccatcgtgaacgcgctggtggagaacaaagccatacgtcccgatgaggctgggctggtatacaatgccctattggagcgcgtagcccgttacaacagcagcaacgtgcagaccaacctggaccggatggtgaccgatgtgcgcgaggccgtgtctcagcgcgagcggttccagcgagacgccaatttagggtcgctggtggctttgaacgccttcctcagcactcagcctgccaacgtgcctcgcggtcagcaagactacacaaactttctaagtgcattgagactcatggtggccgaagtccctcaaagcgaagtgtaccagtccgggccagactactttttccagaccagcagacagggcttgcagacagtgaacctgagccaggcttttaagaacctgaatggtctgtggggagtgcgcgccccagtgggagatcgggcgaccgtgtctagcttgctgacccccaactcccgcctactactgctcttggtagccccattcactgacagcggtagcatcgaccgtaattcgtacttgggctatctgttgaacctgtatcgcgaggccatagggcaaactcaggtagatgagcaaacctatcaagaaattacccaagtgagccgcgctctgggtcgggaggacactggcagcttggaagccaccttaaacttcttgctgaccaaccggtcgcagaagatccctcctcagtattcgcttaccgcggaggaggaacggatcctgagatacgtgcagcagagcgtgggactgttcctaatgcaggagggggcgactcctactgctgcgctcgatatgacagcccgaaacatggagcccagcatgtatgccagtaaccggccttttatcaataaactgctagactacttacacagggcggctgctatgaactctgattatttcaccaatgctatcctgaacccccattggctgcccccacctgggttctatacgggcgagtatgacatgcccgaccccaatgacgggtttttatgggacgatgtggacagtagtgttttctccccgcctcctggttataacacttggaagaaggaaggtggcgatagaaggcactcttccgtgtcactgtccggagcaacgggtgctgcagcggctcccgaggccgcaagtcctttccctagtttgccattttcgctaaacagtgtacgcagcagtgagctgggaagaataacccgtcctcgcttgatcggcgaggaggagtatttgaacgactccctgttgagacccgagagggagaagaatttccccaacaacgggatagaaagcttggttgacaaaatgaaccgctggaagacgtacgcgcacgatcacagggacgatccccgggcgctgggggatagccggggcatcgctacccgtaaacgccagtggcacgacaggcagcggggcctggtgtgggccgatgatgattccgccgacgacagcagcgtgttggacttgggtgggagtggtggtaacccgttcgctcacctgcgcccccgcgtcgggcgcctgatgtaa

SEQ ID NO: 517 - DNA, 1170 bp, Adenovirus B50
  MISC_FEATURE (1)..(1170): B50.orf00048 L1 43 kDa protein
atgcatcccgtgctgcgacagatgcgcccccagcaacagcccccttctcagcagcagctacaacaacagccacaaaaggctcttcctgctcctgtaactactgcggctgcagccgtcagcggcgcggggcagcccgcctatgatctggacttggaagagggcgagggactggcgcgcctgggcgcaccatcgcccgagcggcacccgcgggtgcaactgaaaaaggactctcgcgaggcgtacgtgccccagcagaacctgttcagggacaggagcggcgaggagcctgaggaaatgcgagcttcccgctttaacgcgggtcgcgaactgcgtcacggtctggaccgaagacgggtgctgcgtgatgatgattttgaagtcgatgaagtgacaggaataagtcctgctagggcacatgtggccgcggccaacctagtatcagcttacgagcagaccgtgaaggaggagcgcaactttcaaaaatctttcaacaaccatgtgcgcaccctgattgcccgcgaggaagtgacactgggtctgatgcacctgtgggacctgatggaagccattacccagaaccccaccagcaaacctctaaccgctcagctgtttctggtggtgcaacatagtagagacaatgaggcatttagggaggcgctgttgaacattactgagcccgaggggagatggttgtatgatcttatcaatattctgcaaagtataatcgtgcaagaacgtagcctgggtctagctgagaaggtggctgctattaactactcggtcttgagcctgggcaagcactacgctcgcaagatctacaaaaccccatacgtacctatagacaaggaggtgaagatagatgggttttatatgcgcatgactctcaaggtgctgaccttgagtgacgatctgggagtgtaccgcaacgacaggatgcaccgcgcagtgagcgccagcagaaggcgtgagctgagcgacagagaacttatgcacagcttgcaaagagctctgactggggctggaaccgagggggaaaactactttgacatgggagcggacttgcagtggcagcccagtcgcagggccctggacgcagcagggtatgagcttccttacatagaagaggtggatgaaggccaggatgaggagggcgagtatctggaagactga

SEQ ID NO: 518 - DNA, 1923 bp, Adenovirus B50
  MISC_FEATURE (1)..(1923): B50.orf00052 E2B terminal protein
atgaactacttcatgccgctgcgcaacatctggaaccgcgtacgcgagttcccgcgggcatccaccaccgcctccggtatcacctggatgtccaggtacatctacggttatcaccgcctcatgctggaagacctcgcccctggcgccccggctacagagcgatggcccctataccgccagccgccgccgcactttctcatcggctaccagtacctggtgcgcacctgtaacgattacatctttgacacccgcgcatactcgcgccttaagtataccgagcttgtgcgccctgggcaccagacagtcaactggtcagtcatggccaactgctcctacacaatcaacaccggggcttaccaccgcttcgtggactttgacgacttccaagccaccctcacccaggtgcagcaagccatcctcgcagaaagggttgtagcggacctggcacttgtccagcccatgcgcgggttcgggatcactcgcatgcatggcagagcgggcgaagaagaagtgcccgtggaacgactcatgcaagactactataaagatctggccagatgtcaggataatgcttggggaatggcccatcgcctgcgcatccaacaagccggacccaaagacctggtgctcctcgccaccatccgccgtctcaaaactgcctattttaatttcatcaccagcagcatcgtctcaccctccaaagaggaggaaggagaagaaagagagaaccccgaccgagcgtctagccgcccccgcccgcaagaaacagtgctcagcctaccttgcgattgcgactggttagacgctttcgtcgaaaggttttcagatcccgtggatcttgagacgatcaggtccttgcgcggagtacctacggggcaattaataaaatgcataatcagcgcggtgtccctgcccaacggagagcctcccagtcaccacttcagggagatgcgcggaggcgtcttcactctgagacccagggagaacggtcgtgccgtcaccgagaccatgcgccgccgccgcggagaggtcattgaaagattcatcgaccgtctgcccgtgcgccgccggcgtcgccgcgttccccctcctcctgcagccccacctgaagaggaagagatgttagtggaagaagaagagattgaggaagaaatcccaggggctttcgagctcgaggtgcgcaccaccatcgccgaactcatccgtcttttggaagaagagttgaccgtgtccgcgcgtaactcccagtttttcaactttgccgtggacttctacgaggccatggagcgcttggaagcgctgggcgatgtcagcgagatgccgctgagacgatggatcatgtatttcttcgtcaccgagcacatcgccaccacactcaactaccttttccagcgcctatgcaactatgcggtcttcacccgccacgtggagctcaacctcgcccaggtggtcatgcgcgcgagagatcccgtgggggctgtggtctacagccgcgtctggaacgaggcgggcatgaatgcattctctcaactcattgggcgtatctccaacgacctcgcggccaccgtcgagagagcgggccgcggagatcttcaagaggaagagatcgagcagttcatggccgagatcgcctaccaggacaactctggcgacgtgcaagaaatccttaggcaagccgccgtcaacgataccgagattgattctgttgaactctctttcaggttcaagctcacggggccggtagctttcacccagaggcgtcagatccaggatgtcaaccgccgcgtcgtggcgcatgcgagtcttctgagggcgcagtaccagaacctacccgcgcgcggcgccgacgtaccactgccggccatgccgccgggtcccgaaccgcccctgccgcccggtgcgcgccctcgacaccgcttctaa

SEQ ID NO: 519 - DNA, 3369 bp, Adenovirus B50
  MISC_FEATURE (1)..(3369): B50.orf00053 E2B DNA polymerase
atgcaagaagcaacagagccaccgccgcccaaaaggaaaaacaagggcacggtggtagcgcccaaggggcacggaaccctgcaagccatcgacatctccaccaacggacccgtggagatcaagtaccatctgaacctccctcacgccctcgaaaagatcatgcaagtcaatctcctgacactgcctactaacctgactccgcagcgtctcaggaccctggacagctccggcctgcgcgctctcgtcctcgagctccgcccctgccgcgccgaggtctggacttgcctcccgcgagggctcgtcagcatgaccaccatcgagacagaagatggtcatgccgatgcagacaacatagtagagcgcgaggtacaatcgccaggcctcaattttccactgaaatttctcgtcaaaggaagtcaggtacaactcattcatgaggtgcatcccgtgaatcgatgcgagtactgcggccgtctgtacaagcacaagcatgaatgctcggcgcgtcgcagggagttctacttccatcacatcaacagccattcctccaactggtggcaggagatccagttcttcccgattggctctcatcctcgcacagaaaggctcttcctcacctacgatgtggaaacctacacctggatggggtcctttggcaagcagctaatccccttcatgctggtcatgaaactctctggagaccagcggctcgtcaacatcgcctatgacctggccataaaactcaagtgggatcgctggcggcaggacccccaaaccttctattgcgtcaccccagaaaagatggcagtcgggcagcattttcgtcagtaccgggaccagttacaaacagcactggcagtggacctctggtcctccttcctcaaagcgaaccctcacgtgcacgaatgggccctcgaacactatgctctcactgaccctacagacctcacttttgaagaactcaagaagctgcctcatgtcaggggcacccctcgattcttagaactgtacatagtggggcacaacatcaatggctttgatgagatcgtcttggccgctcaggttatcaataaccgagcagaggtccctcagcctttcagaatcacccgaaatttcatgcccagggccggcaagatcctcttcaatgatgttactttcgctttgcccaaccccgcctacaagaagcgggtggacttccaactctgggaacagggggcctgtgatgacatcgacttcaagtatcaattcctcaaagtcatggtcagggacacttttgccctcactcatacctcgctgcgcaatgcagcccaagcatactctctcccagtggagaagggatgctgtccctacaaggcagtcaatcagttctacatgttgggctcttaccgtgcagaaaaagacgggtttcccctcgaagagtactggaaggatcgcgaagaataccttctcaaccgcgagctgtgggaaaagaaaagccaaccgcgttatgacatcatccaggaaactctcgactactgtgccctggacgtactcgtcaccgccgagctggtagccaagctgcaagagtcatatgcccacttcataagggactctgtaggcctacctcatgcccattttaacatattccagagacctactatctcttccaattcccatgccatctttcgccagatcgtttacagggcggaaaaacccaaccgcaccaatctgggcccgggtcttctcgccccctcacatgaactctatgactatgtgcgagcaagcatcagaggggggcgctgttatcccacttacatcggcatcctcgaagagcccctctatgtctacgatatctgtggcatgtatgcctccgcgctcacccaccccatgccctggggcacccctcttaacccctacgagcgcgcgctggcagttcgagaatggcagatgaccttggatgatcccgccaccatcagctattttgacaaagatttgctaccgggaatatttaccatagatgcggacccccctgatgagttcatgctagaccccctcccccctttctgttcaagaaaaggaggtcgactctgctggaccaatgagcccctccgaggcgaggtagccaccagtgtggatctgataaccctgcacaataggggatggcgagtcagaatagttccggatgaactgacaaccatcttccctgaatggaaatgtgtggcgcgcgagtacgtccagcttaacatcgccgccaaggagcgcgcggacaaggaaaagaaccaaaccatgcgctccatcgccaagcttctatccaatgccctctatggatcatttgccaccaagctggataacaagaagattgtgttttctgaccagatggacgagagtcttatgaaaggcatctctgctggtactgtcaatatcaaatcctcctcgttcctagaaactgacaacctgagtgcagaggtcatgcccgccttcgagagagaatacctaccccaacagctggcgctcctggacagtgatccggaagacagtgaggacgaacagaggcccgcccacttttatacccccccggcggggacccctggtcacgtggcctacacttacaagccaatcacattcttggatgtggaggagggggacatgtgtttacataccgtagagaaggtggaccccctggttgacaacgaccgctacccctcccacgtggcctcctttgtgctggcctggacacgcgcttttgtatcagagtgggctgggttcctctacgaagaggaccgaggcactccgctcgaggacaggcccataaagtcggtctacggggacacggacagcctctttgtcacccagcggggacacgaactcatggaaaccaaaggtaagaaacgcatcaaaaaacatggcggaaaacttgtttttgaccccgatgagccggatctgacctggctcgtggagtgcgaaaccgtctgcgcctcctgcggtgcggatgcatactcccccgaatccattttcctcgcgcccaagctgtatgccctcaaatgtatctactgccccgcctgccataaaacttccaaaggtaagctccgtgccaaaggccacgcggccgaggcgctcaactacgaactcatggtaaactgctacctggccgacatgcagggcgccgatcggcagcggttctcgaccagcaggatgagtctgaagcgcaccctcgcaagcgcccaaccaggcgcgcaccccttcaccgtgacggaaacaaccctgactcggacgctgcgaccatggaaggatcggaccctagcagcgctggacgctcatcgtctgattccctactccaggagccgtcccaacccgcgaaacgaggaggtctgctggatcgagatgccatag

SEQ ID NO: 520 - DNA, 1041 bp, Adenovirus B50
  MISC_FEATURE (1)..(1041): B50.orf00054 IVa2 maturation protein IVa2
atggctgacgggctgaaaccgttgaaaaacttctcctcgctccaggagcttctatcccttgggggagagcgcctcctaacggacttggtgcgggaaaatatccatgtaagggaaatgatgaacgaagtggcccccctgctccgggaggacggcagctgtcgctccctaaactaccatctgcaacccgtaattggggtcatttacggtcccactgggtgcggcaagtctcagctgcttaggaatttgctctcatcccagttaatcaccccggctccagaaacggtattttttatagccccgcaggtggacatgatccccccctcggaactgaaagcctgggaaatgcaaatatgtgagggaaactatgctcccgggccagagggaactttcatcccccaatctggcaccctccgcccaaagtttattaaaatggcttatgatgacctgactcaggagcataactatgatgtttcagacccccggaacgtgttcgcccgtgccgctgcccacggccccatcgctatcattatggatgagtgcatggagaatctggggggtcacaaaggcgtctccaaattttttcatgcttttccctctaagctgcatgataaatttcccaagtgcaccggatacactgtcttggtggttctgcacaatatgaacccgagacgggatctaggcggcaacattgccaacctcaagatccagtccaaaatgcatataatttcccccaggatgcacccgtcccagctcaacagatttgtaaacacctacactaagggcctccccgttgcaattagtctgctcctaaaagatattgtgcaacaccatgcactccgaccttgctatgactgggtgatttataacactaccccggagcaagaggctcttcaatggagctatctccacccccgagacggactaatgcccatgtatctaaacattcaatcccacctttacagggtactggaaaagatccaccgagttctcaatgatcgagaccgatggtccagggcataccgcgcgcgaaaaaccaaataa

SEQ ID NO: 521 - DNA, 417 bp, Adenovirus B50
  MISC_FEATURE (1)..(417): B50.orf00056 IX hexon associated protein IX
atgagtggaagcgcttcttttgaggggggagtatttagcccttatctgacgggcaggctcccatcatgggcaggagttcgtcagaatgtcatgggatccactgtggatgggagacccgtccagcccgccaattcctcaacgctgacctatgccactttgagttcgtcaccattggatgcagctgcagccgccgccgctactgctgccgccaacaccatccttggaatgggctattacggaagcatcgttgccaattccagttcctctaataacccttcaaccctggctgaggacaagctacttgttctcttggctcagctcgaggccttaacccaacgcttaggcgaactgtctaagcaggtggcccagttgcgtgagcaaactgagtctgctgttgccacagcaaagtctaaataa

SEQ ID NO: 522 - DNA, 1221 bp, Adenovirus B50
  MISC_FEATURE (1)..(1221): B50.orf00057 E1B 54.9 kDa protein
gtgcttactaggtctacgtccagtggacaggacaggggcattaagagggaaaggaatcctagtgggaataattcaagaaccgagttggctttaagtttaatgagccgtaggcgtcctgaaactgtttggtggcatgaggttcagagcgaaggcagggatgaagtttcaatattgcaggagaaatattcactagaacaacttaagacctgttggttggaacctgaggatgattgggaggtggccattaggaattatgctaagatatctctgaggcctgataaacagtatagaattactaaaaagattaatattagaaatgcatgctacatatcagggaatggggcagaggttataatagatacccaagataaagcagcttttagatgttgtatgatgggtatgtggccaggggttgtcggcatggaagcagtaacatttatgaatattaggtttaaaggggatgggtataatggcattgtatttatggctaacactaagctgattctacatggttgtagcttttttgggtttaataatacttgtgtagaagcttgggggcaagttggtgtgaggggttgtagtttttatgcatgctggattgcaacatcaggtagggtcaagagtcagttgtctgtgaagaaatgcatgtttgagagatgtaatcttggcatactgaatgaaggtgaagcaagggtccgccactgcgcagctacagaaactggctgcttcattctaataaagggaaatgccagtgtgaagcataatatgatctgtggacattcgaatgagaggccttatcagatgctgacttgcgctggtggacattgcaatattcttgctaccgtgcatatcgtttcccatgcacgcaagaaatggcctgtatttgaacataatgtgattaccaagtgcaccatgcacataggtggtcgcaggggaatgtttatgccttaccagtgtaacatgaatcatgtgaaggtgatgttggaaccagatgccttttccagagtgagcttaacaggaatctttgatatgaatattcaactatggaagatactgagatatgatgacactaaaccgagggtgcgcgcatgcgaatgcggaggcaagcatgctagattccagccggtgtgcgtggatgtgactgaagacctgagacccgatcatttggtgcttgcctgcactggagcggagttcggttctagtggtgaagaaactgactaa

SEQ ID NO: 523 - DNA, 537 bp, Adenovirus B50
  MISC_FEATURE (1)..(537): B50.orf00058 E1B 20 kDa protein
atggaggtttgggctatcttggaagacctgagacagactaggctactgctagaaaacgcctcggacggagtctctggcttttggagattctggttcggtggtgatctagctaggctagtgtttaggataaaacaggactacagggaagaatttgaaaagttattggacgacagtccaggactttttgaagctcttaacttgggccatcaggctcattttaaggagaaggttttatcagttttagatttttctactcctggtagaactgctgctgctgtagcttttcttacttttatattggataaatggatccgacaaacccacttcagcaagggatacgttttggatttcatagcagcagctttgtggagaacatggaaggctcgcagcatgaggacaatcttagattactggccagtgcagcctctgggagtagcagggatactgagacacccaccgaccatgccagcggttctggaggaggagcagcaggaggacaatccgagagccggcctggaccctccggtggaggagtag

SEQ ID NO: 524 - DNA, 201 bp, Adenovirus B50
  MISC_FEATURE (1)..(201): B50.orf00059 E1A 6.5 kDa protein
gtgtctgatgatgagtcgccttctcctgattcaactacctcacctcctgaaattcaggcgcccgtacctgcaaacgtatgcaagcccattcctgtgaagcctaagtctgggaaacgccctgctgtggataagcttgaggacttgttggagggtggggatggacctttggaccttagtacccggaaactgccaaggcaatga

SEQ ID NO: 525 - DNA, 594 bp, Adenovirus B50
  MISC_FEATURE (1)..(594): B50.orf00060 E1A 29.1 kDa protein
atgagacacctgcgattcctgccacaggagattatctccagcgagaccgggatagaaatactggagtttgtggtaaataccctgatgggagatgacccggaaccgccagcgcagcctttcgatccacctacgctgcacgatctgtatgatttagaggtagacgggccggacgatcccaatgaggaagctgtaaatgggttttttactgattctatgctactagctgccgatgaaggattggacataaaccctcctcctgagacccttgataccccaggggtggttgtggaaagcggcagaggtgggataaaattgcctgatctgggagcagctgaaatggacttgcgttgttatgaagagggttttcctccgagtgatgatgaagatggggaaactgaacagtccatccataccgcagtgaatgagggagtaaaagctgccagcgatgtttttaagttggactgtccggagctgcctggacatggctgtaagtcttgtgaatttcacaggaataacactggaatgaaagaactattgtgctcgctttgctatatgagaatgcactgccattttatttacagtaagtgtatttaa

SEQ ID NO: 526 - DNA, 378 bp, Adenovirus B11
  MISC_FEATURE (1)..(378): B11.orf00001 E4 125 aa
atggctgatgaggctttgtatgtgtatttagagggaccgggggcgacgttgcctgaacagcagcagagaaataattatattttttattctcctgtgccttttactttgtatccgcgaggggtggctttgctatacttacgattaagcataattatacccaaaggctatgttggctgttttttctcgttaactgatgctaacatgtctggattgtatgcttcatcaagaattattcatgctggtcaccgcgaggaactttcggtgctgttgtttaatcatgatgacaggttttacgagggtcgagctggagaccctgtggcttgtcttgtgatggaaagactgatttatccatctgttcgtcaggctactatgatatga

SEQ ID NO: 527 - DNA, 390 bp, Adenovirus B11
  MISC_FEATURE (1)..(390): B11.orf00002 E4 130 aa
atgttggagcgcagcgcggtaacctattgcatttgcatcccagaggttttgaatgtttttttggcaaatttttcttttattcaatttttacaagaaactctgcctgattatatttccagcaacttcgatgatattactggcggttcccaatatgcttattccaatcttgtttttgctggagccaattggggaggtctgcgcttgtactgcactgtagcgtcccctgctcttgttcccggggggcttctggctaagcagtttggtgataatatgagagagtttttacaactagaacttaaagaagaacttagagccaagggcatgtcaattgatgttgccattctcaattcgctacaggtgacacaggagcaagatattttgtcattatga

SEQ ID NO: 528 - DNA, 354 bp, Adenovirus B11
  MISC_FEATURE (1)..(354): B11.orf00003 E4 117 aa
atgagggtgtgtttaagaatggtggtggagggcgccctccgggacctgtttgtaatgtgtggattggatttaccacaagaactgacacgaataattcaaggctggaaagctgaaaattatctgggaatggtgcaggaatgtaatatgatgattgaggagttagaaaatgctccttcttttggtattcttttgttcttggatgtgcgcgtggaggctttgctggaagccaccgttgagcaccttgaaaatcgcatttcttttgatctagctgtgctttttcaccaacacagtgggggcgagagatgccatctgcgcgatctacaatttgaagtactgcgagatcgtttggaataa

SEQ ID NO: 529 - DNA, 900 bp, Adenovirus B11
  MISC_FEATURE (1)..(900): B11.orf00006 E4 299 aa
atgtcaggaagcaactccattatgacaaggttgcgcgcacgctcgacatcatgcgccagacatcacccttacaccagagcccagttaccacgttgtgaggaaaatgaaacccgagcttctatgactgaagaccacccgctgttgccagattgtgatactatgactatgcatagtgtaagttgtgttcgtggtcttccttgttctgccagctttactgttctgcaagagcttcctattccctgggatatgtttctaaatcctgaggagttaaaaattatgagaagatgcatgcatttatgtctatgttgtgccactatagatatttttcattctcaagtgattcacggtcgagagaattgggttcttcattgtcattgtaatcagcagggttcacttcaatgcatggctgggggagcggtgttggcagtgtggttccggaaggttatattgggttgcatgattaaccaacgttgtccatggtacagacagattgttaatatgcacatgccaaaagagatcatgtatgtgggtagtgtgtttttgagggaacgtcatttaatttatattaaactttggtatgatggtcatgcaggggcgattatatcagatatgagttttggctggagcgcttttaattatggtttattaaacaatattgtaataatgtgttgtacctactgcaaagatttgagtgaaatcagaatgcgttgctgcgcgcatcgcaccagaaagttgatgttaagggctattaaaatcatgcttcaggacactgtggaccctgatcccataaacagcagtcgcacggagcgacgcagacagcggctgcttgtgggtttgatgagacacaatcgtccgataccgttttcggattatgattcccatcgttcttcttccagatga

SEQ ID NO: 530 - DNA, 252 bp, Adenovirus B11
  MISC_FEATURE (1)..(252): B11.orf00007 E4 ORF6/7 protein
atgaccgtgatccagactccggagtcgcatccgcagcagttggactgtgaaagcgctttaaaagactatcccgatggatttttatctatcactgaccccagattggctcgctctgaaactgtttggaatgtggaatctaaaaccatgtctatatctaatggtatccaaatgtttaaagctgtgcgtggggagagattggtgtattctgttaaatgggaagggggaggcaaaataactactcggattttgtga

SEQ ID NO: 531 - DNA, 978 bp, Adenovirus B11; identical to SEQ ID NO: 137
  MISC_FEATURE (1)..(978): B11.orf00008 L5 fiber

SEQ ID NO: 532 - DNA, 165 bp, Adenovirus B11
  MISC_FEATURE (1)..(165): B11.orf00009 U protein
atgaagattgtgggtacaggagaggagctaaaatttgacatcccctttaaagtatggagaaagtatgccgctgaacggggtttagaataccagagttgggaagagggaagtgaggtgctgctgggagaaaatttcaacagagaccttattgctgatttcaagtaa

SEQ ID NO: 533 - DNA, 408 bp, Adenovirus B11
  MISC_FEATURE (1)..(408): B11.orf00011 E3B 15.3K protein
atgactgaaacactcaccacctccaattccgccgaggatctgctcgatatggacggccgcgtctcagaacagcgactcgcccaactacgcatccgccagcagcaggaacgcgcggccaaagagctcagagatgtcatccaaattcaccaatgcaaaaaaggcatattctgtttggtaaaacaagccaagatatcctacgagatcaccgctactgaccatcgcctctcttacgaacttggcccccaacgacaaaaatttacctgcatggtgggaatcaaccccatagttatcacccagcaaagtggagatactaagggttgcattcactgctcctgcgattccatcgagtgcacctacaccctgctgaagaccctatgcggcctaagagacctgctaccaatgaattaa

SEQ ID NO: 534 - DNA, 405 bp, Adenovirus B11
  MISC_FEATURE (1)..(405): B11.orf00012 E3 14.9 kDa protein
atgcaggctatactaccaatatttttgcttctattgcttccctacgctgtctcaaccccagctgcctatagtactccaccagaacaccttagaaaatgcaaattccaacaaccgtggtcatttcttgcttgctatcgagaaaaatcagaaattcccccaaatttaataatgattgctggaataattaatataatctgttgcaccataatttcatttttgatataccccctatttgattttggctggaatgctcccaatgcacatgatcatccacaagacccagaggaacacattcccctacaaaacatgcaacatccaatagcgctaatagattacgaaagtgaaccacaacccccactactccctgctattagttacttcaacctaaccggcggagatgactga

SEQ ID NO: 535 - DNA, 276 bp, Adenovirus B11
  MISC_FEATURE (1)..(276): B11.orf00013 E3B 10.3K protein
atggtacctagaaatttcttcttcaccatactcatttgtgcatttaatgtttgcgctactttcacagcagtagccacagcaaccccagactgtataggagcatttgcttcctatgcactttttgcttttgttacttgcatctgcgtatgtagcatagtctgcctggttattaattttttccaacttatagactggatccttgtgcgaattgcctacctgcgccaccatcccgaataccgcaaccaaaatatcgcggcacttcttagactcatctaa

SEQ ID NO: 536 - DNA, 564 bp, Adenovirus B11
  MISC_FEATURE (1)..(564): B11.orf00016 E3A 20.6K protein
atggtttccactaccacattccttatgcttactagtctcgcaactctgacttctgctcgctcacacctcactgtaactataggctcaaactgcacactaaaaggacctcaaggtggtcatgtcttttggtggagaatatatgacaatggatggtttacaaaaccatgtgaccaacctggtagatttttctgcaacggcagagacctaaccattatcaacgtgacagcaaatgacaaaggcttctattatggaaccgactataaaagtagtttagattataacattattgtactgccatctaccactccagcaccccgcacaactactttctctagcagcagtgtcgctaacaatacaatttccaatccaacctttgccgcgcttttaaaacgcactgtgaataattctacaacttcacatacaacaatttccacttcaacaatcagcattatcgctgcagtgacaattggaatatctattcttgtttttaccataacctactacgcctgctgctatagaaaagacaaacataaaggtgatccattacttagatttgatatttaa

SEQ ID NO: 537 - DNA, 546 bp, Adenovirus B11
  MISC_FEATURE (1)..(546): B11.orf00017 E3A 20.3K protein
atggcttctcttacatctctcatatttgtcagcattgtcactgccgctcatggacaaacagtcgtctctatccctctaggacataattacactctcataggacccccaatcacttcagaggtcatctggaccaaactgggaagcgttgattactttgatataatctgcaacaaaacaaaaccaataatagtaacttgcaacatacaaaatcttacattgattaatgttagcaaagtttacagcggttactattatggttatgacagatacagtagtcaatatagaaattacttggttcgtgttacccagttgaaaaccacgaaaatgccaaatatggcaaagattcgatccgatgacaattctctagaaacttttacatctcccaccacacccgacgaaaaaaacatcccagattcaatgattgcaattgttgcagcggtggcagtggtgatggcactaataataatatgcatgcttttatatgcttgtcgctacaaaaagtttcatcctaaaaaacaagatctcctactaaggcttaacatttaa

SEQ ID NO: 538 - DNA, 501 bp, Adenovirus B11
  MISC_FEATURE (1)..(501): B11.orf00018 E3A 18.5K protein
atggggcccatactagtcttgcttgttttactttcgcttttggaaccgggttctgccaattacgatccatgtctagacttcgacccagaaaactgcacacttacttttgcacccgacacaagccgcatctgtggagttcttattaagtgcggatgggaatgcaggtccgttgaaattacacacaataacaaaacctggaacaataccttatccaccacatgggagccaggagttcccgagtggtacactgtctctgtccgaggtcctgacggttccatccgcattagtaacaacactttcattttttctgaaatgtgcgatctggccatgttcatgagcaaacagtattctctatggcctcctagcaaggacaacatcgtaacgttctccattgcttattgcttgtgcgcttgccttcttactgctttactgtgcgtatgcatacacctgcttgtaaccactcgcatcaaaaacgccaataacaaagaaaaaatgccttaa

SEQ ID NO: 539 - DNA, 396 bp, Adenovirus B11
  MISC_FEATURE (1)..(396): B11.orf00020 E3 14.6 kDa protein
atgaaagcctttgctgtcttatgtgtactgagtttaataaaaactgaattaagactctcctacggactgccgcttcttcaacccggattttacaaccagaagaacgaaacttttcctgtcgtccaggactctgttaacttcacctttcctactcacaaactagaagctcaacgactacaccgcttttccagaagcattttccctactaatactactttcaaaaccggaggtgagctccaaggtcttcctacagaaaacccttgggtggaagcgggccttgtagtgctaggaattcttgcgggtgggcttgtgattattctttgctacctatacacaccttgcttcactttcttagtggtgttgtggtattggtttaaaaaatggggcccatactag

SEQ ID NO: 540 - DNA, 318 bp, Adenovirus B11
  MISC_FEATURE (1)..(318): B11.orf00021 E3A 12.1K protein
atgtctggtgacgcggctgagctatctcggctgcgacatctagaccactgccgccgctttcgctgctttgcccgggaactcattgagttcatctacttcgaactccccaaggatcaccctcaaggtccggcccacggagtgcggatttctatcgaaggcaaaatagactctcgcctgcaacgaattttctcccagcggcccgtgctgatcgagcgagaccagggaaacaccacggtttccatctactgcatttgtaatcaccccggattgcatgaaagcctttgctgtcttatgtgtactgagtttaataaaaactga

SEQ ID NO: 541 - DNA, 684 bp, Adenovirus B11
  MISC_FEATURE (1)..(684): B11.orf00022 L4 protein VIII hexon associated protein
atgagtaaagaaattcccacgccttacatgtggagttatcaaccccaaatgggattggcggcaggcgcctcccaggactactccacccgcatgaattggctcagcgccgggccttctatgatttctcgagttaatgatatacgcgcctaccgaaaccaaatacttttggaacagtcagctcttaccaccacgccccgccaacaccttaatcccagaaattggcccgccgccctagtgtaccaggaaagtcccgctcccaccactgtattacttcctcgagacgcccaggccgaagtccaaatgactaatgcaggtgcgcagttagctggcggctccaccctatgtcgtcacaggcctcggcataatataaaacgcctgatgatcagaggccgaggtatccagctcaacgacgagtcggtgagctctccgcttggtctacgaccagacggaatctttcagattgccggctgcgggagatcttccttcacccctcgtcaggctgttctgactttggaaagttcgtcttcgcaaccccgctcgggcggaatcgggaccgttcaatttgtggaggagtttactccctctgtctacttcaaccccttctccggatctcctgggcattacccggacgagttcataccgaacttcgacgcgattagcgagtcagtggacggctacgattga

SEQ ID NO: 542 - DNA, 393 bp, Adenovirus B11
  MISC_FEATURE (1)..(393): B11.orf00023 L4 33K protein
atgttttgcattactaccgtcacctccacagcccctactatagccagcaaatcccggcagtctcgacagataaagacagcggcggcgacctccaacagaaaaccagcagcggcagttagaaaatacacaacaagtgcagcaacaggaggattaaagattacagccaacgagccagcgcaaacccgagagttaagaaatcggatctttccaaccctgtatgccatcttccagcagagtcggggtcaagagcaggaactgaaaataaaaaaccgatctctgcgttcgctcaccagaagttgtttgtatcacaagagcgaagatcaacttcagcgcactctcgaggacgccgaggctctcttcaacaagtactgcgcgctgactcttaaagagtag

SEQ ID NO: 543 - DNA, 2439 bp, Adenovirus B11
  MISC_FEATURE (1)..(2439): B11.orf00026 L4 100K protein
atggaaactcagccattgctgtcaacatcgccacgagtgccatcacatctcgtcctcagcgacgaggaaaaggagcagagcttaagcattccaccgcccagtcctgccaccacctctaccctagaagataaggaggtcgacgcatctcatgacatgcagaataaaaaagcgaaagagtctgagacagacatcgagcaagacccgggctatgtgacaccggtggaacacgaggaagagttgaaacgctttctagagagagaggatgaaaactgcccaaaacaacgagcagataactatcaccaagatgctggaaatagggatcagaacaccgactacctcatagggcttgacggggaagacgcgctccttaaacatctagcaagacagtcgctcatagtcaaggatgcattattggacagaactgaagtgcccatcagtgtggaagagctcagccgcgcctacgagcttaacctcttttcacctcgtactccccccaaacgtcagccaaacggcacctgcgagccaaatcctcgcttaaacttttatccagcttttgctgtgccagaagtactggctacctatcacatcttttttaaaaatcaaaaaattccagtctcctgccgcgctaatcgcacccgcgccgatgccctactcaatctgggacctggttcacgcttacctgatatagcttccttggaagaggttccaaagatcttcgagggtctgggcaataatgagactcgggccgcaaatgctctgcaaaagggagaaaatggcatggatgagcatcacagcgttctggtggaattggaaggcgataatgccagactcgcagtactcaagcgaagcatcgaggtcacacacttcgcatatcccgctgtcaacctgccccctaaagtcatgacggcggtcatggaccagttactcattaagcgcgcaagtcccctttcagaagacatgcatgacccagatgcctgtgatgagggtaaaccagtggtcagtgatgagcagctaacccgatggctgggcaccgactctcccagggatttggaagagcgtcgcaagcttatgatggccgtggtgctggttaccgtagaactagagtgtctccgacgtttctttaccgattcagaaaccttgcgcaaactcgaagagaatctgcactacacttttagacacggctttgtgcggcaggcatgcaagatatctaacgtggaactcaccaacctggtttcctacatgggtattctgcatgagaatcgcctaggacaaagcgtgctgcacagcaccctgaagggggaagcccgccgtgattacatccgcgattgtgtctatctgtacctgtgccacacgtggcaaaccggcatgggtgtatggcagcaatgtttagaagaacagaacttgaaagagcttgacaagctcttacagaaatctcttaaggttctgtggacagggttcgacgagcgcaccgtcgcttccgacctggcagacctcatcttcccagagcgtctcagggttactttgcgaaacggattgcctgactttatgagccagagcatgcttaacaattttcgctctttcatcctggaacgctccggtatcctgcccgccacctgctgcgcactgccctccgactttgtgcctctcacctaccgcgagtgccccccgccgctatggagtcactgctacctgttccgtctggccaactatctctcctaccactcggatgtgatcgaggatgtgagcggagacggcttgctggagtgtcactgccgctgcaatctgtgcacgccccaccggtccctagcttgcaacccccagttgatgagcgaaacccagataataggcacctttgaattgcaaggccccagcagccaaggcgatgggtcttctcctgggcaaagtttaaaactgaccccgggactgtggacctccgcctacttgcgcaagtttgctccggaagattaccacccctatgaaatcaagttctatgaggaccaatcacagcctccaaaggccgaactttcggcctgcgtcatcacccagggggcaattctggcccaattgcaagccatccaaaaatcccgccaagaatttctactgaaaaagggtaagggggtctaccttgacccccagaccggcgaggaactcaacacaaggttccctcaggatgtcccaacgacgagaaaacaagaagttgaaggtgcagccgccgcccccagaagatatggaggaagattgggacagtcaggcagaggaggcggaggaggacagtctggaggacagtctggaggaagacagtttggaggaggaaaacgaggaggcagaggaggtggaagaagtaaccgccgacaaacagttatcctcggctgcggagacaagcaacagcgctaccatctccgctccgagtcgaggaacccggcggcgtcccagcagtag

SEQ ID NO: 544 - DNA, 1557 bp, Adenovirus B11
  MISC_FEATURE (1)..(1557): B11.orf00027 E2A DNA binding protein
atggccagccgcgaaggaaatcagttaagcgaccgccacagggagcacacccccgaacgcggaaggggttctgccagtcatccgccttccaggtcggaccgcagcccttcgcaatcgcctccacctctgcccccgaagagaaacacctgtcgccgtgtggggtcaggttcttctaccgacagtcagttggtaatggtgagcgaaacgtcacaatcctccctgtctccggaacggagcgacagtcctcctcctccgataccccccaaaaagaagccaaggaagaccaaacatatccccatgcaagacatcagtcaagacagcgaagaagaaagagaagaggcgcaacttgtagcagtgggtttcagctacccgcccgtgcgcatcgttgagaaggatggcaaaagaagcattgagaagatcgctaaagatgaccctctggctaaaggagctgctgcctgcactgttaagaatccgattagcttgcccctggtgtctgcttgggagaaaggcatggaagtgatgtgtctgctgatggagaagtacaggctggataacgaacttagaacctcttttaaactaatgcctgagcaacacgaacaatacaagcgcatctgtcaccagtacgtaaacgaggagcaccgaggcatccagttaactttcactagtcacaagacactgagcacgatgatgggaagatttctgcagggaatgatacattctttttctcagatcgcccaccataattgggaatgtacaggctgtgcgttgtggcctcatggctgcaatgattatgagggcaagctgaagtgcctgcatggcaatattatgattcagaaggagcagattatcgagatggatgtggccagcgagaacggacaacgagccttaaaggagaatcccgagcgaaccaaaatcacccaaaaccgctggggcagaagtgtggtgcaaatagctaacaatgacgcccgctgctgtgtgaatgatgccggctgtgcagctaaccagttttcgagcaggtcctgcgggatgttttataccgagggtagtaaagcccagcaggctttcaagcaatatgatgctttcatgagagccgtgtatccaggaatcagacaggatcaggccaagatgatactgatccccctgcactgcgattgcaaccacaagcctaattgggtgcccgccatgggtaggcagacctgcaagatgaccccgttcagcattgccaatgctgaagatctggatgtgggcatgattgcagatcccaccgtgctggcaagcgtgagacatccgtcgctgatggtgtttcagtgctgcaatccggtgtaccgcaactctcgcgctcaaagcactggtcctaattgtgatttcaagatttcggctcctgacctgcttggagctttgcagctgaccagaaagctgtggagtgacatcctgcccgatataccggttcccaagttggtgattcccgaattcaagtggcaacccaagtatcagttccgcaacgtatcactgcctgcgggtcattctgattctcgtcagaacccattcgacttgtaa

SEQ ID NO: 545 - DNA, 630 bp, Adenovirus B11
  MISC_FEATURE (1)..(630): B11.orf00029 L3 23K proteinase
atggcctgcggatcccaaaacggctccagcgagcaagagctcagagccattgtccaagacctgggttgcggaccctattttttgggaacctacgataagcgcttcccggggttcatggcccccgataagctcgcctgtgccattgtaaatacggccggacgtgagacggggggagagcactggttggctttcggttggaacccacgttctaacacctgctacctttttgatccttttggattctcggatgatcgtctcaaacagatttaccagtttgaatatgagggtctcctgcgccgcagcgctcttgctaccaaggaccgctgtattacgctggaaaaatctacccagaccgtgcagggtccccgttctgccgcctgcggacttttctgctgcatgttccttcacgcctttgtgcactggcctgaccgtcccatggacggaaaccccaccatgaaattgctaactggagtgccaaacaacatgcttcattctcctaaagtccagcccaccctgtgtgacaatcaaaaagcactctaccattttcttaatacccattcgccttattttcgctcccatcgtacacacatcgaaagggccactgcgttcgaccgtatggatgttcaataa

SEQ ID NO: 546 - DNA, 2847 bp, Adenovirus B11; identical to SEQ ID NO: 197
  MISC_FEATURE (1)..(2847): B11.orf00031 L3 hexon

SEQ ID NO: 547 - DNA, 741 bp, Adenovirus B11
  MISC_FEATURE (1)..(741): B11.orf00034 L3 protein VI
atggaagacatcaatttttcatccttggctccgcgacacggcacgaagccgtacatgggcacctggagcgacatcggcacgagccaactgaacgggggcgccttcaattggagcagtatctggagcgggcttaaaaattttggctcaaccataaaaacatacgggaacaaagcttggaacagcagtacaggacaggcgcttagaaataaacttaaagaccagaacttccaacaaaaagtagtcgatgggatagcttccggcatcaatggagtggtagatttggctaaccaggctgtgcagaaaaagataaacagtcgtttggacccgccgccagcaaccccaggtgaaatgcaagtggaggaagaaattcctccgccagaaaaacgaggcgacaagcgtccgcgtcccgatttggaagagacgctggtgacgcgcgtagatgaaccgccttcttatgaggaagcaacgaagcttggaatgcccaccactagaccgatagccccaatggccaccggggtgatgaaaccttctcagttgcatcgacccgtcaccttggatttgccccctccccctgctgctactgctgtacccgcttctaagcctgtcgctgccccgaaaccagtcgccgtagccaggtcacgtcccgggggcgctcctcgtccaaatgcgcactggcaaaatactctgaacagcatcgtgggtctaggcgtgcaaagtgtaaaacgccgtcgctgcttttaa

SEQ ID NO: 548 - DNA, 231 bp, Adenovirus B11
  MISC_FEATURE (1)..(231): B11.orf00035 L2 protein X
atggccctcacttgtcgccttcgcgttcccatcactggttaccgaggaagaaactcgcgccgtagaagagggatgttgggacgcggaatgcgacgctacaggcgacggcgtgctatccgcaagcaattgcggggtggttttttaccagccttaattccaattatcgctgctgcaattggcgcgataccaggcatagcttccgtggcggttcaggcctcgcaacgacattga

SEQ ID NO: 549 - DNA, 1056 bp, Adenovirus B11
  MISC_FEATURE (1)..(1056): B11.orf00036 L2 protein V
atgtccaagcgcaaatacaaggaagaaatgctgcaggttatcgcacctgaagtctacggccaaccgttgaaggatgaaaaaaaaccccgcaaaatcaagcgggttaaaaaggacaaaaaagaagaggaagatggcgatgatgggctggcggagtttgtgcgcgagtttgccccacggcgacgcgtgcaatggcgtgggcgcaaagttcgacatgtgttgagacctggaacttcggtggtctttacacccggcgagcgttcaagcgctacttttaagcgttcctatgatgaggtgtacggggatgatgatattcttgagcaggcggctgaccgattaggcgagtttgcttatggcaagcgtagtagaataacttccaaggatgagacagtgtcgatacccttggatcatggaaatcccacccctagtcttaaaccggtcactttgcagcaagtgttacccgtaactccgcgaacaggtgttaaacgcgaaggtgaagatttgtatcccactatgcaactgatggtacccaaacgccagaagttggaggacgttttggagaaagtaaaagtggatccagatattcaacctgaggttaaagtgagacccattaagcaggtagcgcctggtctgggggtacaaactgtagacattaagattcccactgaaagtatggaagtgcaaactgaacccgcaaagcctactgccacctccactgaagtgcaaacggatccatggatgcccatgcctattacaactgacgccgccggtcccactcgaagatcccgacgaaagtacggtccagcaagtctgttgatgcccaattatgttgtacacccatctattattcctactcctggttaccgaggcactcgctactatcgcagccgaaacagtacctcccgccgtcgccgcaagacacctgcaaatcgcagtcgtcgccgtagacgcacaagcaaaccgactcccggcgccctggtgcggcaagtgtaccgcaatggtagtgcggaacctttgacactgccgcgtgcgcgttaccatccgagtatcatcacttaa

SEQ ID NO: 550 - DNA, 1698 bp, Adenovirus B11; identical to SEQ ID NO: 169
  MISC_FEATURE (1)..(1698): B11.orf00037 L2 penton

SEQ ID NO: 551 - DNA, 1593 bp, Adenovirus B11
  MISC_FEATURE (1)..(1593): B11.orf00040 L1 IIIa protein
atggaagctgtagtgccttcccgctctaatcccactcatgagaaggtcctggccatcgtgaacgcgttggtggagaacaaagctattcgtccagatgaggccggactggtatacaacgctctcttagaacgcgtggctcgctacaacagtagcaatgtgcaaaccaatttggaccgtatgataacagatgtacgcgaagccgtgtctcagcgcgaaaggttccagcgtgatgccaacctgggttcgctggtggcgttaaatgctttcttgagtactcagcctgctaatgtgccgcgtggtcaacaggattatactaactttttaagtgctttgagactgatggtatcagaagtacctcagagcgaagtgtatcagtccggtcctgattacttctttcagactagcagacagggcttgcagacggtaaatctgagccaagcttttaaaaaccttaaaggtttgtggggagtgcatgccccggtaggagaaagagcaaccgtgtctagcttgttaactccgaactcccgcctattattactgttggtagctcctttcaccgacagcggtagcatcgaccgtaattcctatttgggttacctactaaacctgtatcgcgaagccatagggcaaagtcaggtggacgagcagacctatcaagaaattacccaagtcagtcgcgctttgggacaggaagacactggcagtttggaagccactctgaacttcttgcttaccaatcggtctcaaaagatccctcctcaatatgctcttactgcggaggaggagaggatccttagatatgtgcagcagagcgtgggattgtttctgatgcaagagggggcaactccgactgcagcactggacatgacagcgcgaaatatggagcccagcatgtatgccagtaaccgacctttcattaacaaactgctggactacttgcacagagctgccgctatgaactctgattatttcaccaatgccatcttaaacccgcactggctgcccccacctggtttctacacgggcgaatatgacatgcccgaccctaatgacggatttctgtgggacgacgtggacagcgatgttttttcacctctttctgatcatcgcacgtggaaaaaggaaggcggcgatagaatgcattcttctgcatcgctgtccggggtcatgggtgctaccgcggctgagcccgagtctgcaagtccttttcctagtctacccttttctctacacagtgtacgtagcagcgaagtgggtagaataagtcgcccgagtttaatgggcgaagaggagtatctaaacgattccttgctcagaccggcaagagaaaaaaatttcccaaacaatggaatagaaagtttggtggataaaatgagtagatggaagacttatgctcaggatcacagagacgagcctgggatcatggggattacaagtagagcgagccgtagacgccagcgccatgacagacagaggggtcttgtgtgggacgatgaggattcggccgatgatagcagcgtgctggacttgggtgggagaggaaggggcaacccgtttgctcatttgcgccctcgcttgggtggtatgttgtaa

SEQ ID NO: 552 - DNA, 177 bp, Artificial Sequence
  B11.orf00041 E2B 6.1 kDa hypothetical protein
atgatggccgatagacggttggcctggggttgctgtctaaaggcttcggggttgcgagtcgtcaacgccatgatacgttgcatggcctgggtccaatcgtccgaggagttaatgccggacggctggctctgcagcgccgcccgcattgcgggatccggtgcttgctgttccatctag

SEQ ID NO: 553 - DNA, 1167 bp, Adenovirus B11
  MISC_FEATURE (1)..(1167): B11.orf00042 L1 55K protein
atgcatcccgtgctgcgacagatgcgcccccaacaacagcccccctcgcagcagcagcagcagcaatcacaaaaggctgtccctgcaactactgcaactgccgccgtgagcggtgcgggacagcccgcctatgatctggacttggaagagggcgaaggactggcacgtctaggtgcgccttcacccgagcggcatccgcgagttcaactgaaaaaagattctcgcgaggcgtatgtgccccaacagaacctatttagagacagaagcggcgaggagccggaggagatgcgagcttcccgctttaacgcgggtcgtgagctgcgtcacggtttggaccgaagacgagtgttgcgggacgaggatttcgaagttgatgaaatgacagggatcagtcctgccagggcacacgtggctgcagccaaccttgtatcggcttacgagcagacagtaaaggaagagcgtaacttccaaaagtcttttaataatcatgtgcgaaccctgattgcccgcgaagaagttacccttggtttgatgcatttgtgggatttgatggaagctatcattcagaaccctactagcaaacctctgaccgcccagctgtttctggtggtgcaacacagcagagacaatgaggctttcagagaggcgctgctgaacatcaccgaacccgaggggagatggttgtatgatcttatcaacattctacagagtatcatagtgcaggagcggagcctgggcctggccgagaaggtggctgccatcaattactcggttttgagcttgggaaaatattacgctcgcaaaatctacaagactccatacgttcccatagacaaggaggtgaagatagatgggttctacatgcgcatgacgctcaaggtcttgaccctgagcgatgatcttggggtgtatcgcaatgacagaatgcatcgcgcggttagcgccagcaggaggcgcgagttaagcgacagggaactgatgcacagtttgcaaagagctctgactggagctggaaccgagggtgagaattacttcgacatgggagctgacttgcagtggcagcctagtcgcagggctctgagcgccgcgacggcaggatgtgagcttccttacatagaagaggcggatgaaggcgaggaggaagagggcgagtacttggaagactga

SEQ ID NO: 554 - DNA, 1917 bp, Adenovirus B11
  MISC_FEATURE (1)..(1917): B11.orf00044 E2B terminal protein
atgaactacttcatgccgctacgcaacatttggaaccgcgtacgcgagtttcctcgggcttctactaccgccgcaggaatcacctggatgtccaggtacatctacggctatcaccgccttatgttggaagacctcgcccctggcgctccagctacagaacgatggcctctctaccgccaaccaccgccgcattttcttatagggtaccagtatctggtgcgcacctgcaacgattacatctttgacacccgcgcctattcgcgccttaaatacaccgagctcgtgcgccctggtcaccagacagttaactggtcagtcatggccaactgtgcttacaccattaatacaggagcttaccaccgctttgtggattttgatgactttcaagccacccttacccaagtacagcaagccatcctcgccgaaagagtcgtagctgacttggcactggtacaaccaatgcgcggatttggactcacacgtatgcatggcagaacgggtgaggaagaagtgcccgtagaacggctcatgcaagactactacaaagatcttgctagatgtcaggataatgcttggggaatggccaatcgcctgcgtatccagcaagccggacccaaagacctggtgctcctcgccaccatccgccgtcttagaactgcctactttaatttcatcaccagcagcatcgtctcaccttcccgagatgaagaagaaacagaagacccagaccgaacacataaccacccccgcccacaagaagccgtactcagcctaccttgtgactgtgactggttagacgctttcgtcgaaaggttttcagatcccgtggatcttgacacgatcagatctctgcgtgcagtccctacgggccaattaataaaatgtataatcagcgccctctccctcccaaacggagaacctcccagtcaccactttaaggagatgcgcggcggtgtttttactctgcgaccgcgcgagaacggccgcgccgtcactgaaaccatgcgccgccgccgcggagaggtcattgaacgattcatcgaccgtttgcccgtgcgccgtcgacgtcgccgcgtgccccctccgcccccgcctgaagacgaagaagagatgttagtggaagaagagatagaagaggaagaagagatcccgggagccttcgaacgcgaagtacgggccaccatagccgaactcatccgtcttctcgaggaggaattgaccgtgtccgcgcgaaactcccagttttttaattttgccgtggacttctacgaggccatggagcgcttggaagctctgggcgatgttagcgaaatgccgctgagacgatggatcatgtatttcttcgtcgccgaacacattgccaccacactcaactacctttttcagcgcctatgcaactatgcggtcttcaccagacacgtggagcttaacctcgctcaggtggtgatgcgcgcaagagactccgagggggccgtggtttacagccgcgtctggaacgaggcgggcatgaatgcattctcccaactcatgggccgtatctccaatgacctcgcggccaccgtcgaaagagcgggtcgcggagatcttcaggaggaagaaatcgagcagttcatggcggagatcgcctaccaggacaactctggtgacgtacaagaaatactgagacaagctgccgttaacgataccgaaattgattctgttgaactctctttcaggttcaagctcacggggccggtagctttcacccagagacgtcagatacaagacgtcaatcgacgcgtggtggcgcacgcaagtcttctcagagcgcagtaccagaacctgcccgtgcgcggcgccgacgtgccactaccagccatgccctcgggtccggaacaaccgctgccgcccggcgcgcgtccccgtcaccgcttctga

SEQ ID NO: 555 - DNA, 3369 bp, Adenovirus B11
  MISC_FEATURE (1)..(3369): B11.orf00045 E2B DNA polymerase
atgcaagaagcaagagagccaccaccgatcaaaagaaaaaacaaaggtacggtagtggcgcccaaaggacacggaaccctgcaagccattgacgtctctacaaacgaacctgtggaaatcaagtaccatctgaacctcccgcacgccctggaaaagatcatgcaagttaatcttctgtccctacctactaacctgagtccgcagcgtctcaggactctggacagctccagcctgcgcgctctcgtccttcagctccgcccctcccgcgccgaggtctggacttgcctcccgcgggggctcgtcagcatgaccaccatcgaaacagaagatgaacaggccgatacagcgaatatagaagagcacgagatacaatcgccaggcctcggcttcccactgaaatttctcgtcaagggaagccaggtacaactcattcacgagatacaacccgtgcaacgctgcgactactgcggccgtctgtacaagcacaaacacgaatgctcggcgcgccgcagaaacttctacttccatcacatcaacagccaatcctccaactggtggcaggaaatccagttcttcccgatcggctctcatcctcgcacagaaagactcttcctgacctacgatgtggaaacttacacctggatgggatcctttggcaaacaactagttcctttcatgctggtcatgaaactctcaggagaagagcgtctcgtcaacatggcccacgatctagccattaaactcaagtgggatcgatggcaacaagaccccagaaccttctactgtgtcactccagaaaaaatggcaattggccggcattttcgtcagtatcgggaccagttacaaacagcactggcggtagatctttggtcatcattcctacatgcaaatcctcacctgcacgaatgggctctcgaacactacgccttatctgaccccacagacctaacctttgatgagctcagtaagctacctcacgtcagaggcacgccgcgtttcatagaattatacatcgtaggacacaacatcaacggtttcgacgagatcgtcctagctgcccaggtgatcaacaatcgagcggaagtaccacagccttttcgcatcactcgcaattttatgcccagagccggtaagattctcttcaatgatgttactttcgctttgcccaaccccgcctacaagaaacgggtagacttccaactctgggaacagggagcctgtgacgacatcgacttcaaataccaatttctcaaagtcatggtcagagacacctttgcccttactcacgcttcgctacgaaaagctgctcaagcatactctctacccgtagagaagggctgctgcccttacaaggcagttaatcagttctacatgctaggatcttaccgtgcagacaaagacgggtttccgctagaagagtactggaaggatcgcgaagaataccttctcaaccgcgaactgtgggaaaagaaaaaccaaccaggttatgacatcattcaagaaacacttgactactgcgccctagacgtacttgtcaccgccgaactggtaaccaagcttcaagaatcttatgcccactttgtcagagactctgtaggtctacctcatgcccatttcaacatttttcaaagacccaccatctcttccaattctcacgccatctttcgccagatcgtctacagaacagaaaaacccaatcgcaccaacttgggtccggggctgctagcgccatcacatgaactatatgactatgtgcgagcaagtatcagaggggggcgatgctatccaacctacataggcatctttgaggatcccatctacgtctatgacatctgtggcatgtatgcctctgcactcacccatcccatgccatggggcagtccccttaacccatatgagcgcgcactggcagctcgagaatggcaaatggccttagatgaccccactcccatcagctattttgataaggatttacttccgggaatctttaccatggatgcagaccctcccgatgaacttatgctagacccacttccccctttctgttctaggaaaggaggtaggctctgttggaccaatgaaccccttcgaggcgaggtggccaccagtgtggatttaattaccttgcataatcgagggtggcaagtgagaatcgtgccagatgaattaacaactatcttccccgaatggaagtgcctggcacgcgagtatgtccaactcaacatcgccgccaaagagcgcgcggacaaggaaaagaaccaaaccatgcgatccattgccaaacttttatccaacgccctgtatggatcatttgccaccaaacttgacaataaaaaaattgtgttttctgaccaaatggacgaaaacctcatgaaaggcatctcaaccggcactgtcaatatcaaatcctcctcgttcttagaaactgacaacctgagtgcagaggtcatgcccgccttcgagagggaatacctaccccaacagctgacgttcctggacagcgatccggaagacagtgaggaagagcaaagaaccgcccccttttatacccccccagcggggaccccaggtcacgtgaaatacacctacaagccaatcacattcctggatgttgaagagggtgacatgtgtttgcatactttggaaaaggtggaccccctggttgacaacgatcgctacccctcccacatagcctcctttgtgctggcctggacgcgcgcctttgtatcagagtggtcagagttcctgtacgaagaagaccgaggcactccactggagaagaggcctgtaaaatcagtctacggggacacggacagcctgtttgtcactcaacgaggacacgaactcatggagaccaaaggtaagaaacgcatcaaaaaatatggcggaaaacttgtttttgaccccaatgaaccggatttaacctggctggtggaatgtgaaactgtttgcgcctcctgcggcgcagatgcatactccccagaatccgttttccttgcgcccaagttgtatgcgctgaaatgcctatactgcccggtatgcaagaaaacttccaaaggtaagctccgcgccaaaggccacgcagccgaggcgctcaactacgaactcatggtaaactgctacttggccgacatacagggcgccaagcgacagaagttttcgaccagcaggatgagtctgaagcgcaccctggcaagcgcccaagcaggcgcacaccccttcactgtgacggaaacaaccctgactcgaacactgagaccctggaaggaccgaaccctggcagcgctggacgcccatcgtctcataccctattccaggagccgtccaaacccgcgaaacgaggaggtctgctggatcgagatgccatag

SEQ ID NO: 556 - DNA, 1047 bp, Adenovirus B11
  MISC_FEATURE (1)..(1047): B11.orf00046 E2B protein IVa2
atgcccatggctgacggtctgaaaccgctgaaaaacttttcctcactacaagaacttctatcactaggaggagagcgcctcctaatggatttggtgcgggaaaatatgcatgtaagggaaatgatgaacgaggtggcccccttgcttcgagaagacggcagttgccgttccctaaactaccacctgcaacccgtaatcggaatcatttatggccccaccggatgtggcaaatctcaattgctcagaaatttgctatcatcacaattaatcacccccgccccagaaacggtgtttttcatagccccccaggtggacatgattccaccctcggaactgaaagcttgggaaatgcaaatctgtgaggggaactatgctccggggcccgaaggaacattcataccccaatctggtactctccgccccaaattcattaaaatggcttatgatgatttaactcaggaacataactatgatgtgtcagacccacggaacgtgtttgcccgcgccgctgcccacggccccattgctattatcatggatgagtgcatggaaaatcttggaggacacaagggtgtctccaaatttttccacgcttttccatccaagctgcacgataaatttcctaaatgtaccggatacaccgtcttggtggtccttcataacatgaacccaagacgggatcttggcggcaatattgccaacttaaaaatccaatccaaaatgcacataatttcaccccgaatgcacccatcccagctcaaccggtttgtaaacacctacaccaagggcttatctgtggcaatcagcctacttctaaaagatattgtgcaacaccatgcactgcgaccttgttatgactgggtgatttacaacactaccccggagcatgaatcccttcaatggagctatctccaccccaaagacggcctaatgcccatgtatctaaacattcaatcccacctctataggatcctggaaaaaatccaccgagttctcaatgatagagatcggtggtctagggcataccgtgcgcgaaaaatgaaataa

SEQ ID NO: 557 - DNA, 330 bp, Adenovirus B11
  MISC_FEATURE (1)..(330): B11.orf00047 E1B hexon associated protein IX
atgggatctactgtggatggaagacccgtccaacccgccaattcttcaacgctgacctatgctactttaagttcttcacctttggacgcagctgcagctgccgccgccgcttctgttgccgctaacactgtgcttggaatgggttactatggaagcatcatggctaattccacttcctctaataacccttctaccctgactcaggacaagttacttgtccttttggcccagctggaggctttgacccaacgtctgggtgaactttctcagcaggtggtcgagttgcgagtacaaactgagtctgctgtcggcacggcaaagtctaaataa

SEQ ID NO: 558 - DNA, 783 bp, Adenovirus B11
  MISC_FEATURE (1)..(783): B11.orf00052 E1B 55K protein
atgattcatgttacactggtaaggcataaacattcctctacgcccacctgcatgcatggtacacttcgtcatcacattgtgatcaaaaacaggccattttttgcgttgatgggaaacaatatgcacagtagccagcatattacaatgcccaccagcacaagtgagcatttgataaggcctctcatcggaagcaccgcaaatcatgttatgctttacgctggcatttcccttaatcaaaataaaacatccagtatctgtagaagcgcagtggcggacccttgcttcgccttcattcagaatgcccaggttacatctttgaaatatgcatttcttcagagacaattgactcttggttctgccagctgtggcaatccaacacgcatagaaactacatccccgtacactaacctgtccccaggcatctacacaggtattgttgaaaccaaaaaagctacaaccatgcaatataagtttggtattggccataaacactattccattataaccatctcccctaaacttaacatttacaaaagttactgcttccataccgactaccccaggccacatatccatcatgcagcatctaataactgccttgtcttgagtatctattaccacctcagccccatttccagatatgtaacaagcattccggatattaatccgtctagtaatcttatactgtttatcaggcctcaaagctatcttggcataatttttaatggccacctcccaatcatcctcaggctccaaccaacatgttttcacctgttccagtga

SEQ ID NO: 559 - DNA, 135 bp, Adenovirus B11
  MISC_FEATURE (1)..(135): B11.orf00053 E1B 55K protein
atgttttcacctgttccagtgaatatttctcctgcaatacagaaacttcatcccttccctctttctgaacctcatgccaccaaatggtttcaggacgtctgcgactcattaaacttaaagccaactcagatctag

SEQ ID NO: 560 - DNA, 261 bp, Adenovirus B11
  MISC_FEATURE (1)..(261): B11.orf00055 E1B 54.9 kDa protein
atgaatcatgtgaaagtgttgttggaaccagatgccttttccagaatgagcctaacaggaatttttgacatgaacatgcaaatctggaagatcctgaggtatgatgatacgagatcgagggtacgcgcatgcgaatgcggaggcaagcatgccaggttccagccggtgtgtgtagatgtgactgaagatctcagaccggatcatttggttattgcccgcactggagcagagttcggatccagtggagaagaaactgactaa

SEQ ID NO: 561 - DNA, 543 bp, Adenovirus B11
  MISC_FEATURE (1)..(543): B11.orf00056 E1B 21K protein
atggaggtttgggccattttggaagaccttaggaagactaggcaactgttagagaacgcttcggacggagtctccggtttttggagattctggttcgctagtgaattagctagggtagtttttaggataaaacaggactataaacaagaatttgaaaagttgttggtagattgcccaggactttttgaagctcttaatttgggccatcaggttcactttaaagaaaaagttttatcagttttagacttttcaaccccaggtagaactgctgctgctgtggcttttcttacttttatattagataaatggatcccgcagactcatttcagcaggggatacgttttggatttcatagccacagcattgtggagaacatggaaggttcgcaagatgaggacaatcttaggttactggccagtgcagcctttgggtgtagcgggaatcctgaggcatccaccggtcatgccagcggttctggaggaggaacagcaagaggacaacccgagagccggcctggaccctccagtggaggaggcggagtag

SEQ ID NO: 562 - DNA, 261 bp, Adenovirus B11
  MISC_FEATURE (1)..(261): B11.orf00058 E1A 231 R
atgctgtttttcacatgtatattgagtgtgagttttgtgcttcttattataggtcctgtgtctgatgctgatgaatcaccatctcctgattctactacctcacctcctgagattcaagcacctgttcctgtggacgtgcgcaagcccattcctgtgaagcttaagcctgggaaacgtccagcagtggaaaaacttgaggacttgttacagggtggggacggacctttggacttgagtacacggaaacgtccaagacaataa

SEQ ID NO: 563 - DNA, 840 bp, Adenovirus B11
  MISC_FEATURE (1)..(840): B11.orf00059 E1A 262 R
atgtggtatttatggcagggtggagtatttgttcagggccaggtagactttgacccattacgtggaggtttcgattaccgtgttttttacctgaatttccgcgtaccgtgtcaaagtcttctgtttttacgtaggtgtcagctgatcgctagggtatttatacctcagggtttgtgtcaagaggccactcttgagtgccagcgagaagagttttctcctctgcgccggcagtttaataataaaaaaatgagagatttgcgatttctgcctcaggaaataatctctgctgagactggaaatgaaatattggagcttgtggtgcacgccctgatgggagacgatccggagccacctgtgcagctttttgagcctcctacgcttcaggaactgtatgatttagaggtagagggatcggaggattctaatgaggaagctgtaaatggcttttttaccgattctatgcttttagctgctaatgaagggttagaattagatccgcctttggacacttttgatactccaggggtaattgtggaaagcggtacaggtgtaagaaaattacctgatttgagttccgtggactgtgatttgcactgctatgaagacgggtttcctccgagtgatgaggaggaccatgaaaaggagcagtccatgcagactgcagcgggtgagggagtgaaggctgccaatgttggttttcagttggattgcccggagcttcctggacatggctgtaagtcttgtgaatttcacaggaaaaatactggagtaaaggaactgttatgttcgctttgttatatgagaacgcactgccactttatttacagtaagtgtgtttaa

SEQ ID NO: 564 - DNA, 129 bp, Artificial Sequence
  B11.orf00060 hypothetical protein
atgcgtcacatttcccgcgacaacttgcaaaaaaactccacccccacaaaacgtcattttcccacggtcgcaccgccccttttagccgttaaccccacagccaatcaccacacgatccacactttttaa

SEQ ID NO: 565 - DNA, 177 bp, Artificial Sequence
  B14a.orf00002 hypothetical protein
atggggctaaagtacacaaaatcccgccaaacccaacacacaccccgaaactgcgtcaccacaaaagtacagtttcacttccgcaatcccaacaagcggcacttcctctttctcacgggacgtcacatccgcttaacttgcaacctcattttcccacggccgcgccgccccttttag

SEQ ID NO: 566 - DNA, 378 bp, Adenovirus B14a
  MISC_FEATURE (1)..(378): B14a.orf00003 E4 ORF1 protein
atggctgatgaggctttgtatgtgtatttagagggaccgggggcgacgttgcctgaacagcagcaaaggaataattatattttttattctcctgtgccttttactttgtatccgcgaggggtggctttgctatatttacgattaagcataattatacccagaggctatattggctgttttttgtctttaactgatgctaacatgtttggattgtatgcttcatcaagaattattcatgctggtcaccgcgaggaactttcggtgctgttgtttaatcacgatgacaggttttacgagggtcgggctggagaccctgtggcttgtcttgtgatggaaagactgatttatccacctgttcgtcaggctactctgatatga

SEQ ID NO: 567 - DNA, 429 bp, Adenovirus B14a
  MISC_FEATURE (1)..(429): B14a.orf00005 E4 ORF2 protein
ttgtttttttattttttgcagactcattcaaaactaacaatgttggagcgcagcgcggtaacttattgcatttgcatcccagaggttttgaatgtttttttggcaaatttttcttttattcaatttttacaacaaactctgcctgattatatttccagcaactttgatgacattactggtggttcccaatatgcttattccaatcttgtttttgctggagccaattggggaggtctgcgcttgtactgcactgtagcgtgtcctgctcttgttcccggggggcttctggctaagcagtttggtgataatatgaaagagtatttacaactagaacttagagaagaacttagagccaacggcatgtcaattgatgttgccattctcaatttgctacaggtgacacaggagcaagatattttgtcattatga

SEQ ID NO: 568 - DNA, 354 bp, Adenovirus B14a
  MISC_FEATURE (1)..(354): B14a.orf00006 E4 ORF3 protein
atgagggtgtgtttaagaatggtggtggagggcgccctccgggacctgtttgtaatgtgtggattggatttaccacaagaaatgacacgaataatccaaggctggaaagctgaaaattatctgggaatggtgcaggactgtaatatgatgattgaggagttagaaaatgctccttcttttggtattcttttgttcttggatgtgcgcgtggaggctttgctggaagccaccgttgagcaccttgaaaatcgcatttcttttgatctagctgtgctttttcaccaacacagtgggggcgacagatgccatctgcgcgatctacaatttgaagtactgcgagatcgtttggaataa

SEQ ID NO: 569 - DNA, 900 bp, Adenovirus B14a
  MISC_FEATURE (1)..(900): B14a.orf00009 E4 ORF6 protein
atgtcaggaagcaactccattatgacaaggttgtgcgcacgctcgacatcatgcgccagacatcatccttacaccagagcccagttaccacgttgtgaggaaaatgaaacccgagcttctatgactgaagaccacccgctgttgccagattgtgatactatgactatgcatagtgtaagttgtgttcgtggtcttccttgttctgccagctttactgttctgcaagagcttcctattccttgggatatgtttctaaatcctgaggagttaaaaattatgagaagatgcatgcatttatgtctatgttgtgctactatagatatttttcattctcaagtgattcacggtcgagagaattggattcttcattgtcattgtaatcagcagggttcacttcaatgcatggctgggggagcggtgttggcagtgtggttccggaaggttatattgggctgcatgattaaccaacgttgtccatggtacagacagattgttaatatgcacatgccaaaagagatcatgtatgtgggtagtgtgtttttgagggaacgtcatttaatttatattaaactttggtatgatggtcatgcaggggcgattatatcagatatgagttttggctggagtgcttttaattatggtttattaaacaatattgtgataatgtgctgtacctactgtattaatctaagtgaaataagaatgcgttgctgcgcgcatcgcaccagaaagttaatgttaagggctattaaaatcatgcttcaggacactgtggatcccgatcccataaacagcagtcgcacggagcgacgcagacagcggctgcttgtgggtttgatgagacacaatcgcccgatcccgttttcggattatgattcccatcgttcttcttccagatga

SEQ ID NO: 570 - DNA, 252 bp, Adenovirus B14a
  MISC_FEATURE (1)..(252): B14a.orf00010 E4 ORF6/7 protein
atgaccgtgatccagactccggagtcgcatccgcatcagttggactgtgaaagcgctttaaaagactatcccgatggatttttatctatcactgaccccagattggctcgctctgaaactgtttggaatgtggaatctaaaaccatgtctatctctaatggtatccaaatgtttaaagctgtgcgtggggagagattggtatattctgttaaatgggaagggggaggcaaaataactactcggagtttgtga

SEQ ID NO: 571 - DNA, 978 bp, Adenovirus B14a; identical to SEQ ID NO: 138
  MISC_FEATURE (1)..(978): B14a.orf00012 L5 fiber protein

SEQ ID NO: 572 - DNA, 165 bp, Adenovirus B14a
  MISC_FEATURE (1)..(165): B14a.orf00013 U protein
atgaagattgtgggtacaggagaggagctaaaatttgacatcccctttaaagtatggagaaagtatgccgctgaacggggtttagaataccagagttgggaagagggaagtgaggtgctgctgggagaaaatttcaatagagaccttattgctgattttaagtaa

SEQ ID NO: 573 - DNA, 441 bp, Adenovirus B14a
  MISC_FEATURE (1)..(441): B14a.orf00015 E3B 15.3K protein
ttgttttactttcgcttttgggaccgggttctgccaactacaacactcaccacctccaattccgccgaggatctgcttgatatggacggccgcgtctcagaacagcgactcgcccaactacgcatccgccagcagcaggaacgcgtggccaaagagctcagagatgtcatccaaattcaccaatgcaaaaaaggcatattctgtttggtaaaacaagccaaaatatcctacgagatcaccgctaccgaccatcgcctctcttacgagcttggcccccaacgacaaaaatttacctgcatggtgggaatcaaccccatagttatcacccaacaaagtggagatactaagggttgcattcactgctcctgcgattccatcgagtgcacctacaccctgctgaagaccctatgcggactaagagacctgctacccatgaattaa

SEQ ID NO: 574 - DNA, 396 bp, Adenovirus B14a
  MISC_FEATURE (1)..(396): B14a.orf00016 E3 14.6 kDa protein
atgaaagcctttgctgtcttatgtgtactgagtttaataaaaactgaattaagactctcctacggactgccgcttcttcaacccggattttacaaccagaagaacgaaacttttcctctcatccaggactctgttaactttacctttcctacttacaaaccagaagctcaacgacaacaccgcttttccagaagcattttccctactaatactactttcaaaaccggaggtgagctccacagtctccccgcagaaaacccttgggtggaagcgggccttgtagtgctaggaattcttgcgggcgggcttgtgattattctttgctacctatacacaccttgcttcactttcctagtggtgttgtggtattggtttaaaaaatggggcccatactag

SEQ ID NO: 575 - DNA, 318 bp, Adenovirus B14a
  MISC_FEATURE (1)..(318): B14a.orf00017 E3 11.7 kDa protein
atgtctggtgacgcggctgagctatctcggctgcgacatctagaccactgccgccgctttcgctgttttgcccgggaactcattgagttcatttacttcgaactccccaaggatcaccctcaaggtccggcccacggagtgcggattactatcgaaggtaaaataaactctcgcctgcatcgaattttctcccagcggcccgtgctgatcgagcgagaccagggaaacaccacggtttctatctactgcatttgtaatcacccaggattgcatgaaagcctttgctgtcttatgtgtactgagtttaataaaaactga

SEQ ID NO: 576 - DNA, 684 bp, Adenovirus B14a
  MISC_FEATURE (1)..(684): B14a.orf00018 L4 protein VIII
atgagtaaagaaattcccacgccttacatgtggagttatcagccccaaatgggattggcggcaggcgcctcccaggactactccacccgcatgaattggctcagcgccgggccttctatgatttctcgagttaatgatatacgcgcctaccgaaaccaaatacttttggaacagtcagctcttaccaccacgccccgccaacaccttaatcccagaaattggcccgccgccctagtataccaggaaagtcccgctcccaccactgtattacttcctcgagacgcccaggccgaagtccaaatgactaatgcaggtgcgcagttagctggcggctccaccctatgtcgtcacaggcctcggcataatataaaacgcctgatgattagaggccgaggtattcagcttaacgacgagtcggtgagctctccgcttggtctacgaccagacggaatctttcaaattgccggctgcgggagatcttccttcacccctcgtcagactgttttgactttggaaagttcgtcttcgcaaccccgctcgggcggaatcgggaccgttcaatttgtggaggagtttactccctctgtctacttcaaccctttctccggatctcctgggcactacccggacgagttcataccgaactttgacgcaattagcgagtcagtggacggctacgattga

SEQ ID NO: 577 - DNA, 393 bp, Adenovirus B14a
  MISC_FEATURE (1)..(393): B14a.orf00019 L4 33 kDa protein
atgttttgcattactaccgtcacctccacagcccctactatagccagcaaatcccggcaatctcgacagaaaaagacagcggcggcgacctccaacagaaaaccagcagcggcagttaaaaaatacacaacaagtgcagcaacaggaggattaaagattacagccaacgagccagcgcaaacccgagagctaagaaatcggatctttccaaccctgtatgccatcttccagcagagtcggggccaagagcaggaactgaaaataaaaaaccgatctttgcgttcgctcaccagaagttgtttgtatcacaagagcgaagatcaacttcagcgcactcttgaggacgccgaggctctcttcaacaagtactgcgcgctgactcttaaagagtag

SEQ ID NO: 578 - DNA, 2439 bp, Adenovirus B14a
  MISC_FEATURE (1)..(2439): B14a.orf00022 L4 100 kDa hexon-assembly associated protein
atggaaactcagccattgctgtcaacatcgccacaagtgccatcacatctcgtcgtcagcgacgaggaaaaggagcagagcttaaccattccaccgcccagtcctgccaccacctctaccctagaagataaggaggtcgacgcatctcatgacatgcagaataaaaaagcgaaagagtctgaaacagacatcgagcaagacccgggctatgtgacaccggtggaacacgaggaagagttgaaacgctttctagagagagaggatgaaaactgcccaaaacagcaagcggataactatcaccaagatgctggaaatagggatcagaacaccgactacctcatagggcttgacggggaagacgcgctccttaaacatctagcaagacagtcactcatagtcaaggatgcattattggacagaactgaagtgcccatcagtgtggaagagctcagccgcgcctacgagcttaaccttttttcacctcgtactccccccaaacgccagccaaacggcacctgcgagccaaatcctcgcttaaacttttatccagcttttgctgtgccagaagtactcgctacttatcacatcttttttaaaaatcaaaaaattccagtctcctgccgcgctaatcgcacccgcgctgacgccctacttaatctgggacctggttcacgcttacctgatatagcttccttggaagaggttccaaaaatcttcgagggtctgggcaataatgagactcgggccgcaaatgctctgcaaaagggagaaaatggcatggatgagcatcacagcgttctggtggaattggagggcgataatgccagactcgcagtactcaagcgaagcgtcgaggtcacacactttgcataccccgctgtcaacctgccccctaaagttatgacggcggtcatggaccagttactcattaagcgcgcaagtcccctttcagaagacatgcatgacccagacgcctgtgatgagggtaaaccagtggtcagtgatgagcagctaacccgatggctggacaccgactctccccgggatttggaagagcgtcgcaagcttatgatggccgtagtgctggttaccgtagaactagagtgtctccggcgtttctttaccgattcagaaaccttgcgcaaactcgaagagaatctgcactacacttttagacacggctttgtgcggcaggcgtgcaagatatctaacgtggaactcaccaacctggtttcctacatgggtattctgcatgagaatcgtctaggacaaagcgtgctgcacagcacccttaagggggaagcccgccgtgattacatccgcgattgtgtctatctctacctgtgccacacgtggcaaaccggcatgggtgtatggcagcaatgtttagaagaacagaacttgaaagagcttaacaagctcttacagaaatctcttaaggttctgtggacagggttcgacgagcgcaccgtcgcttccgacctggcagacctcatcttcccagagcgtcttagggttactttgcgaaacggactgcctgactttatgagccagagcatgcttaacaattttcgctctttcatcctggaacgctccggtatcctgcccgccacctgctgcgcactgccctccgactttgtgcctctcacctaccgcgagtgccccccgccgctatggagtcactgctacctgttccgtctggccaactacctctcctaccactcggatgtgatcgaggatgtgagcggagacggcttgctggagtgtcactgccgctgcaatctgtgcacgccccaccggtccctagcttgcaacccccagttgatgagcgaaacccagataataggcacctttgaactgcaaggccccagcagccaaggcgatgggtcttctcctgggcaaagtttaaaactgaccccgggactgtggacctctgcctacttgcgcaagtttgccccggaagattaccacccctatgaaatcaagttctatgaggaccaatcacagcctccaaaggccgaactttcggcctgcgtcatcacccagggggcaattctagcccaattgcaagccatccaaaaatcccgccaagaatttctactgaaaaagggtaagggggtctaccttgacccccagaccggcgaggaactcaacacaaggttccctcaggatgtcccaacgacgagaaagcaagaagttgaaggtgcagccgccgcccccagaagatatggaggaagattgggacagtcaggcagaggaagcggaggaggacagtctggaggacagtctggaggaagacagtttggaggaggaaaacgaggaggcagaggaggtggaagaagtaaccgccgacaaacagttatccccggctgcggagacaagcaacagcgctatcatctccgctccgagtcgaggaacgcggcggcgtcccagcagtag

SEQ ID NO: 579 - DNA, 1557 bp, Adenovirus B14a
  MISC_FEATURE (1)..(1557): B14a.orf00024 E2A DNA binding protein
atggccagccgcgaaggaaatcagttaagcgaccgccacagggagcacacccccgaacgcggaaggggttctgccagtcatccgccttccaggtcggaccgcagcccttcgcaatcgcctccacctctgcccccgaagagaaacacctgtcgccgtgtggggtcaggttcttctaccgacagtcagttggtaatggtgagcgaaacttcacaatcctccctgtctccggaacggagcgacagtcctcctcccccgataccccccaaaaagaagccaaggaagaccaaacatgttcccatgcaagacatcagtcaagacagcgaagaagaaagagaagaggcgcagcttgtagcagtaggtttcagctacccgcccgtgcgcatcgttgagaaggatggcaaaagaagcattgaaaagattgccaaagatgatcctctggctaaaggagctgctgcctgtactgttaagaatccgattagcttgcccctggtgtctgcttgggagaagggcatggaagtgatgtgtgtactgatggagaagtacaggctggataacgaacttagaacctcttttaaactaatgcctgagcagcacgaacaatacaagcgcatctgtcaccagtacgtaaacgaggagcaccgaggcatccagttaactttcactagtcacaagacactgagcacgatgatgggaagatttctgcagggaatgatacattctttttctcagatcgcccaccataattgggaatgtacaggctgtgcgttgtggcctcatggctgcaatgattatgagggcaagctgaagtgcctgcatggcactattatgattcagaaggagcagattatcgagatggatgtggccagcgagaatggacaacgagccttgaaggagaatcccgagcgaaccaaaatcacccaaaaccgctggggcagaagtgtggtgcaaatagccaacaatgacgcccgctgctgtgtgaatgatgccggctgcgcagctaaccagttttcgagcaggtcctgcgggatgttctataccgagggtagtaaagcccagcaggctttcaagcaatatgatgctttcatgagagccgtgtatccaggaatcagacaggatcaggccaagatgatactaatccccctgcactgcgattgcaaccacaagcctaattgggtgcccgccatgggtaggcagacctgcaagatgaccccgttcagcattgccaatgctgaagatctggatgtgggcatgattgcagatcccaccgtgctggcaagcgtgagacatccgtcgctgatggtgtttcagtgctgcaatccggtgtaccgcaactctcgcgctcagagcactggtcctaattgtgatttcaagatttcggctcctgacctgctgggagctttgcagctgaccagaaagctgtggagtgacatcctacccgatataccggttcccaagttggtgattcccgaattcaagtggcaacccaagtatcagttccgcaacgtatcactgcccgcgggtcattctgattctcgtcagaacccattcgacttgtaa

SEQ ID NO: 580 - DNA, 651 bp, Adenovirus B14a
  MISC_FEATURE (1)..(651): B14a.orf00025 L3 23K proteinase
ttgcaaacagcagctgcaaccatggcctgcggatcccaaaacggctccagcgagcaagagctcagagccattgtccaagacctgggttgcggaccctattttttgggaacctacgataagcgcttcccggggttcatggcccccgataagctcgcctgtgccattgtaaacacggccggacgtgagacggggggagagcactggttggctttcggttggaacccacgttctaacacctgctacctttttgatccttttggattctcggatgatcgtcttaaacagatttaccagtttgaatatgagggtctcctgcgccgcagcgctcttgctaccaaggaccgctgtattacgctggaaaaatctacccagaccgtgcagggcccccgttctgccgcctgcggacttttctgctgcatgttccttcatgcctttgtgcactggcctgaccgtcccatggacggaaaccccaccatgaaattgctgactggagtgccaaacaacatgcttcattctcctaaagtccagcccaccctgtgtgacaatcaaaaagcactctaccattttctcaatacccattcgccttattttcgctcccatcgtacacacatcgaaagggccactgcgttcgaccgtatggatgtgcaataa

SEQ ID NO: 581 - DNA, 2838 bp, Adenovirus B14a; identical to SEQ ID NO: 198
  MISC_FEATURE (1)..(2838): B14a.orf00028 L3 hexon protein

SEQ ID NO: 582 - DNA, 741 bp, Adenovirus B14a
  MISC_FEATURE (1)..(741): B14a.orf00031 L3 protein VI
atggaagacatcaatttttcatccttggctccgcgacacggcacgaagccgtacatgggcacctggagcgacatcggcacgagccaactgaacgggggcgccttcaattggagcagtatctggagcgggcttaaaaattttggctcaaccataaaaacatacgggaacaaagcttggaacagcagtacaggacaggcgcttagaaataaacttaaagaccagaactttcaacaaaaagtagtcgatgggatagcttccggcatcaatggagtggtagatttggctaatcaggctgtgcagaaaaagataaacagtcgtttggacccgccgccagcaaccccaggtgaaatacaagtggaggaagaaattcctccgccagaaaaacgaggcgacaagcgtccgcgtcccgatttggaagagacgctggtgacgcgcgtagatgaaccgccttcttatgaggaagcaacgaagcttggaatgcccaccactagaccgatagcccctatggctaccggggtaatgaaaccttctcagttgcatcgacccgtcactttggatttgccccctccccctgctgctactgctgtacccgcttctaagcctgtcgctgccccgaaaccagtcgccgtagccaggtcacgtcccgggggcgctcctcgtccaaatgcgcactggcaaaatactctgaacagcatcgtgggtctaggcgtgcaaagtgtaaaacgccgtcgctgcttttaa

SEQ ID NO: 583 - DNA, 231 bp, Adenovirus B14a
  MISC_FEATURE (1)..(231): B14a.orf00033 L2 protein X
atggccctcacttgtcgccttcgcgttcccatcactggttaccgaggaagaaattcgcgccgtagaagagggatgttggggcgcggaatgcgacgctacaggcgacggcgtgctatccgcaagcaattgcggggtggttttttgccagccttaattccaattatcgctgctgcaattggcgcgataccaggcatagcttccgtggcggttcaggcctcgcaacgacattga

SEQ ID NO: 584 - DNA, 1056 bp, Adenovirus B14a
  MISC_FEATURE (1)..(1056): B14a.orf00034 L2 protein V
atgtccaagcgcaaatacaaggaagaaatgctgcaggttatcgcacctgaagtctacggccaaccgctgaaggatgaaaaaaaaccccgcaaaatcaagcgggctaaaaaggacaaaaaagaagaggaagatggcgatgatgggctggcggagtttgtgcgcgagtttgccccacggcgacgcgtgcaatggcgtggacgcaaagttcgacatttgttgagacctggaacttcggtggtctttacacccggcgagcgttcaagcgctacttttaagcgttcctatgatgaggtgtacggggatgatgatattcttgagcaggcggctgaccgattaggcgagtttgcttatggcaagcgtagtagaataaatcccaaggatgagacagtgtccatacccttggatcatggaaatcccacccctagtcttaaaccggtcactttgcagcaagtgttacccgtaactccgcgaacaggtgttaaacgcgaaggtgaagatttgtatcccactatgcaactaatggtacccaaacgccaaaagttggaggacgttttggagaaagtaaaagtggatccagatattcaacctgaggttaaagtgagacccattaagcaggtagcgcctggtctgggagtacaaactgtagacattaagattcccactgaaagtatggaagtgcaaactgaacccgcaaagcctactgccacctccactgaagtgcaaacggatccatggatgccgatgcctattacaactgacgccgccggtcccactcgaagatcccgacgaaagtacggtccagcaagtctgttgatgcccaactatgttgtacacccatctattattcctactcctggttaccgaggcactcgctactatcgcagccgaaacagtacctcccgccgtcgccgcaagacacctgcaaatcgcagtcgtcgccgtagacgcacaagcaaaccgactcccggcgccctggtgcggcaagtgtaccgcaatagtagtgcggaacctttgacactgccgcgtgcgcgttaccatccaagtatcatcacttaa

SEQ ID NO: 585 - DNA, 579 bp, Adenovirus B14a
  MISC_FEATURE (1)..(579): B14a.orf00035 L2 protein VII
atgtccattcttatctcgcccagtaataacaccggttggggtctgcgcgctccaagcaagatgtacggaggcgcacgcaaacgttctacccaacatcccgtgcgtgttcgcggtcattttcgcgctccatggggtgccctcaagggccgcactcgcgttcgaaccaccgtcgatgatgtaatcgatgaggtggttgccgacgcccgtaattatactcctactgcgcctacatctactgtggatgcagttattgacagtgtagtggctgacgctcgcaactatgctcgacgtaagagccggcgaaggcgcattgccagacgccaccgagctaccactgccatgcgagccgcaagagctctgctacgaagagctagacgcgtgggacgaagagccatgcttagggcggccagacgtgcagcttcgggcgccagcgccggcaggtcccgcaggcaagcagccgctgtcgcagcggcgactattgccgacatggcccaaacgcgaagaggcaatgtatactgggtgcgtgacgctgccaccggtcaacgtgtacccgtgcgcacccgtccccctcgcacttag

SEQ ID NO: 586 - DNA, 1608 bp, Adenovirus B14a; identical to SEQ ID NO: 170
  MISC_FEATURE (1)..(1608): B14a.orf00036 L2 penton protein

SEQ ID NO: 587 - DNA, 1764 bp, Adenovirus B14a
  MISC_FEATURE (1)..(1764): B14a.orf00040 L1 protein IIIa
atggaacagcaagcaccggatcccgcaacgcgggcggcgctgcagagccagccgtccggcattaactcctcggacgattggacccaggccatgcaacgtatcatggcgttgacgactcgcaaccccgaagcctttagacagcaaccccaggccaaccgtctatcggccatcatggaagctgtagtgccttcccgctctaatcccactcatgagaaggtcctggccattgtaaacgcgttggtggagaacaaagctattcgtccagatgaggccggactggtatacaacgctcttttagaacgcgtggctcgctacaacagtagcaatgtgcaaaccaatttggaccgtatgataacagatgtacgcgaagccgtgtctcagcgtgaaaggttccagcgcgatgccaaccttggttcgctggtggcgttaaatgcttttttgagtactcagcctgctaatgtgccgcgtggtcaacaggattatactaactttttgagtgcgttgagactgatggtatctgaagtacctcagagcgaagtgtatcagtccggacctgactacttctttcagactagcagacagggtttgcagacggtaaatctgagccaagcttttaaaaaccttaaaggtttgtggggagtgcatgccccggtaggagaaagagcaaccgtgtctagcttgttaactccaaactcccgcctattactactgttggtagctcctttcaccgacagcggcagcatcgaccgtaattcctatttgggttacctactaaacctgtatcgcgaagccatagggcaaagccaggtggacgagcagacctatcaagaaattacccaagtcagtcgcgctttgggtcaggaagacactggcagtttggaagccactctgaacttcttgcttaccaatcggtctcagaagatccctcctcaatatgctcttactgcggaggaggagaggatccttagatatgtgcagcagagcgtgggattgtttctgatgcaagagggggcaactccgactgcggcattggacatgacagcgcgaaatatggagcccagcatgtatgccagtaaccggcctttcattaacaaactgctggactacttgcacagagctgccgctatgaactctgattattttaccaatgccatcctaaacccgcactggctgcccccacctggtttctacacgggcgaatatgacatgcccgaccctaatgacgggtttctgtgggacgacgtggacagtaatgttttttcacctctttttgatcatcgcacgtggaaaaaggaaggcggcgatagaatgcattcttctgcatcgctgtccggggtcatgggtgctaccgcggctgagcccgagtctgcaagtccttttcctagtctacccttttctctacacagtgtacgtagcagcgaagtgggtagaataagtcgcccgagtttaatgggcgaagaggaatacctaaacgattccttgctcagaccggcgagagaaaaaaatttcccaaacaatggaatagaaagtttggtggataagatgagtagatggaagacttatgctcaggatcacagagacgagcctgggatcatggggactacaagtagagcgagccgtagacgccagcgtcatgacagacagaggggtcttgtgtgggaagatgaggattcggccgatgatagcagcgtgttggacttgggtgggagaggaaggggcaacccgtttgctcatttgcgccctcgcttgggtggtatgttgtaa

SEQ ID NO: 588 - DNA, 1161 bp, Adenovirus B14a
  MISC_FEATURE (1)..(1161): B14a.orf00042 L1 43 kDa protein
atgcatcccgtgctgcgacagatgcgtccccaacaacagcccccctcgcagcagcagcaaccacaaaaggctgtccctgcaactactgcaactgccgccgtgagcggtgcgggacagcccgcctatgatctggacttggaagagggcgaaggactggcacgtctaggtgcgccctcgcccgagcggcatccgcgagttcaactgaaaaaagattctcgcgaggcgtatgtgccccaacagaacctatttagagacagaagcggcgaggagccggaggagatgcgagcttcccgctttaacgcgggtcgtgagctgcgtcacggtttggaccgaagacgagtgttgcgggacgaggatttcgaagttgatgaagtgacagggatcagtcctgccagggcacacgtggctgcagccaaccttgtatcggcttacgagcagacagtaaaggaagagcgtaacttccaaaagtcttttaataatcatgtgcgaaccctgattgcccgcgaagaagttactcttggtttgatgcatttgtgggatttgatggaagctatcattcagaaccctactagcaaacctctgaccgcacagctgtttctggtggtgcaacacagcagagacaacgaggctttcagagaggcactgctcaacatcactgaacccgaggggagatggttgtatgatcttatcaacattctacagagtatcatagtgcaggagcggagcctgggcctggccgaaaaggtggctgccatcaattactcggttttaagtttgggaaaatattacgctcgcaagatctacaagactccatacgttcccatagacaaggaggtgaagatagatgggttctacatgcgtatgacgctcaaggtcttgaccctgagcgatgatcttggggtgtaccgcaatgacagaatgcatcgcgccgttagcgccagtaggaggcgcgagttaagcgacagggaactgatgcacagtttgcaaagagctctgactggagctggaacagagggtgagaattactttgacatgggagctgacttgcagtggcagcctagtcgcagggctctgagcgccgcgacggcaggatgtgagcttccttacatagaagaggcggatgaaggcgaggaggaagagggcgagtacttggaagactga

SEQ ID NO: 589 - DNA, 1917 bp, Adenovirus B14a
  MISC_FEATURE (1)..(1917): B14a.orf00043 E2B terminal protein
atgaactacttcatgccgctacgcaacatttggaaccgcgtacgcgagtttcctcgggcttccactaccgccgcaggaatcacctggatgtccaggtacatctacggctatcaccgccttatgttggaagacctcgcccccggcgctccagctacagaacaatggcctctctaccgccaaccaccaccgcattttcttatagggtaccagtatctggtgcgcacctgcaacgattacatttttgacacccgcgcctattcgcgccttaaatacaccgagctcgtgcgccatggtcaccaaacagttaactggtcagtcatggccaactgtgcttacaccatcaataccggggcttaccaccgcttcgtggattttgatgactttcaagccaccctcacccaagtacagcaagccatcctcgccgaaagagttgtagctgacttggcactggtccaaccaatgcgcgggtttggactcacacgtatgcatggcagaacgggtgaagaagaagtgcccgtagaacggctcatgcaagactactacaaagatctggctagatgtcaggataatgcttggggaatggccaatcgcctgcgtatccagcaagccggacccaaagacctggtgctcctcgccaccatccgccgtcttagaactgcctactttaatttcatcaccagcagcatcgtctcaccttcccgagatgaagaaggaatagaagacccagaccgaacacataaccacccccgcccacaagaagccgtactcagcctaccttgtgactgtgactggttagacgctttcgttgaaaggttttcagatcccgtggatcttgacacgattagatctctgcgcgcagtccctacgggccaattaataaaatgtataatcagcgccctttccctcccaaacggagaacctcccagtcaccactttaaggagatgcgcggcggtgtttttactctgcgaccgcgcgagaacggccgcgccgtcactgaaaccatgcgccgccgccgcggagaggtcattgaacgattcatcgaccgtttgcccgtgcgccgtcgacgtcgccgcgtgccccctccgcccccgcctgaagacgaagaagagatgttagtggaagaagagatagaagaggaagaagagatgccgggagccttcgaacgcgaagtacgggccaccatagccgaactcatccgtcttctcgaggaggaattgaccgtgtccgcgcgaaactcccagttttttaattttgccgtggacttctacgaggccatggagcgcttggaagctctgggcgatgtcagcgaaatgccgctgagacgatggatcatgtatttctttgtcgccgaacacatcgccaccacactcaactacctttttcagcgcctatgcaactatgcggtcttcaccagacacgtggagcttaacctcgctcaggtggtgatgcgcgcaagagactccgagggggccgtggtttacagccgcgtctggaacgaggcgggcatgaatgcattctcccaactcatgggccgtatctccaatgacctcgcggccaccgtcgagagagcgggtcgcggagatcttcaggaggaagaaatcgagcagttcatggcggagatcgcctaccaggacaactctggtgacgtacaagaaatactgagacaagctgccgttaacgataccgaaattgattctgttgaactctctttcaggttcaagctcacggggccggtagctttcacccaaagacgtcagatacaagacgtcaatcgacgcgtggtggcgcacgcaagtcttctcagagcgcagtaccagaacctgcccgtgcgcggcgccgacgtgccactaccagccatgcccccgggtccggaacaaccgctgccgcccggcgcgcgtccccgtcaccgcttttaa

SEQ ID NO: 590 - DNA, 3369 bp, Adenovirus B14a
  MISC_FEATURE (1)..(3369): B14a.orf00044 E2B DNA polymerase
atgcaagaagcaagagagccaccaccgatcaaaagaaaaaacaaaggtacggtagtggcacccaaaggacacggaaccctgcaagccattgacgtctctacaaacgaacctgtggaaatcaagtaccatctaaacctcccgcacgccctggaaaagatcatgcaagttaatcttctgtccctacctactaacctgagtccgcagcgtctcaggactctggacagctccagcctgcgcgctctcgtccttcagctccgcccctcccgcgccgaggtctggacttgcctcccgcgggggctcgtcagcatgaccaccatcgaaacagaagatgaacaggccaatacagcgaatatagaagagcacgagatacaatcgccaggcctcggcttcccactgaaatttctcgtcaagggaagccaggtacagctcattcacgagatacaacccgtgcaacgctgcgactactgcggccgtctgtacaagcacaaacacgaatgctcggcgcgccgcagaaacttctacttccatcacatcaacagccaatcctccaactggtggcaggaaatccagtttttcccaatcggctctcatcctcgcacagaaagactcttcctgacctacgatgtggaaacttacacctggatggggtcctttggcaaacaactagttcctttcatgctggtcatgaaactctcaggagaagagcgtctcgtcaacatggcccacgatctagccattaaacttaagtgggatcgatggcaacaagatcccggaaccttctactgtgtcactccagaaaaaatggcaattggccagcattttcgtcagtatcgggaccagttacaaacagcactggcggtggatctttggtcatcattcctacatgcaaatcctcatctgcacgaatgggcccttgaacactacgccttatctgaccctacagacctaacctttgatgagctcaataagctacctcacgtcagaggcacgccgcgtttcatagaattatacattgtaggacacaacatcaacggcttcgacgagatcgtcctagctgcccaggtgatcaacaatcgagcggaagtaccacagccttttcgcatcactcgcaattttatgcccagagccggtaagattctcttcaacgatgttactttcgctttgcccaaccccgcctacaagaaacgggtagacttccaactctgggaacagggagcctgtgacgacatggactttaaataccaatttctcaaagtcatggttagagacaccttcgcccttactcacgcttcgctacgaaaagctgctcaagcatactctctacccgtagagaagggctgctgcccttacaaggcagttaatcagttctacatgctaggatcttaccgtgcagacaaagacgggtttccgctagaagagtactggaaggatcgcgaagaataccttctcaaccgcgaactgtgggaaaagaaaaaccaaccaggttatgacatcattcaagaaacacttgactactgcgccctggacgtacttgtcaccgcccaactggtaaccaagcttgaagaatcttatgcccactttatcagagactctgtaggtctacctcatgcccacttcaacatttttcaaagacccaccatctcttccaattctcacgccatctttcgccagattgtctacagaacagaaaaacccaatcgcaccaacttgggtccggggctgctagcgccgtcacatgaactatatgactatgtgcgagcaagtatcagaggggggcgatgctatccaacctacataggcatctttgaggatcccatctacgtctatgacatctgtggcatgtatgcctctgcactcacccatcccatgccctggggcagtccccttaacccatatgagcgcgcactggcagctcgagaatggcaaatggccttagatgaccccactcccatcagctattttgataaggatttacttcctggaatctttaccatggatgcagaccctcccgatgaacttatgctagacccacttccacctttctgttctaggaaaggaggtaggctctgctggaccaacgaaccccttcgaggcgaggtggccaccagtgtggatttaattaccttgcataaccgagggtggcaagtgagaattgtgccagatgaattgacaactatcttccccgaatggaagtgcctggcacgcgaatatgtccaactcaacatcgctgccaaagagcgcgcggacaaggaaaagaaccaaaccatgcgatccattgccaaacttttatccaacgccctgtatggatcatttgccaccaaacttgacaataaaaaaattgtgttttctgaccaaatggacgaaaacctcatgaaaggcatctcaagcggcactgtcaatatcaaatcctcctcgttcttagaaactgacaacctgagtgcagaggtcatgcccgccttcgagagggaatacctaccccaacagctgacgttcctggacagcgatccggaagacagtgaggaagagcagagaaccgcccccttttatacccccccagctgggaccccaggtcacgtgaaatacacctacaagccaatcacattcctggatgttgaagagagtgacatgtgtttgcatactttggaaaaggtggaccccctggttgacaacgatcgctacccctcccacatagcctcctttgtgctggcctggacgcgcgcctttgtatcagagtggtcagagttcctatacgaagaagaccgaggcactccactggaaaagaggcctgtaaaatcagtctacggggacacggacagcctgtttgtcactcaacgaggacacgaactcatggagaccaaaggtaagaaacgcatcaaaaaatatggcggaaaacttgtttttgaccccaatgaaccggatttaacctggctggtggaatgtgaaactgtttgcgcctcctgcggcgcggatgcatactccccagaatccattttccttgcgcccaagctgtatgcgctgaaatgcctatactgcccggtatgcaagaaaacttccaaaggtaagctccgcgccaagggccacgcagccgaggcgctcaactacgaactcatggtaaactgctacttggccgacatacagggcgccaagcggcacaagttttcgaccagcaggatgagtctgaagcgcaccctggcaagcgcccaagcaggcgcacaccccttcactgtgacggaaacaaccctgacccgaactttgagaccctggaaggaccgaaccctggcagcgctggacgcccatcgtctcataccctactccaggagccgtccaaacccgcgaaacgaggaggtctgctggatcgagatgccatag

SEQ ID NO: 591 - DNA, 1047 bp, Adenovirus B14a
  MISC_FEATURE (1)..(1047): B14a.orf00045 IVa2 protein
atgcccatggctgacggtctaaaaccgctgaaaaacttttcctcactacaagaacttctatcactaggaggagagcgcctcctaatggatttggtgcgggaaaatatgcatgtaagggaaatgatgaacgaggtggcccccttgcttcgagaagacggcagttgccgttccctaaactaccaactgcaacctgtaatcggaatcatttatggccccaccggatgtggcaaatctcaattgctcagaaacttgctatcatcccaactaattaccccagccccagaaacggtgttctttatagccccccaggtggacatgattccaccctcggaactgaaagcttgggaaatgcaaatctgtgaggggaactatgctccggggcccgaaggaacattcataccccaatcgggtactctccgtcccaaatttattaaaatggcctatgatgatttaactcaggaacataactatgatgtgtcagacccacggaacgtgtttgcccgcgctgctgcccacggccctattgctattatcatggatgagtgcatggaaaatctcggaggacacaagggtgtctccaaatttttccacgcttttccatccaagctgcacgataaatttcctaaatgtaccggatacaccgtcttggtggtacttcataacatgaacccaagacgagatcttggcggcaatattgccaacttaaaaatccaatccaaaatgcacataatttcaccccgaatgcacccctcccagctcaaccggtttgtaaacacctacaccaagggcttatctgtggcaatcagcctacttctaaaagatattgtgcaacaccatgcacagcgaccttgttatgactgggtaatttacaacactaccccggagcatgaatcccttcaatggagctatctccaccccaaagacggcctaatgcccatgtatctaaacattcaatcccacctttataggattttggaaaaaatccaccgtgttctcaatgatcgagatcggtggtctagggcataccgtgcgcgaaaaatgaaataa

SEQ ID NO: 592 - DNA, 420 bp, Adenovirus B14a
  MISC_FEATURE (1)..(420): B14a.orf00046 IX pIX protein
atgagtggaaacgcttcttttaatgggggagtcttcagcccttatctgacagggcgtctcccatcctgggcaggagttcgtcagaatgttatgggatctactgtggatggaagacccgtccaacccgccaattcttcaacgctgacctatgctactttaagttcttcacctttggacgcagctgcagccgccgctgccgcctctgttgccgctaacactgtgcttggaatgggttactatggaagcatcctggctaattccacttcctctaataacccttctaccctgactcaggacaagttacttgtccttttggcccagctggaggctttgacccaacgtctgggtgaactttctcagcaggtggccgagttgcgagtacaaactgagtctgctgtcggcacggcaaagtctaaataa

SEQ ID NO: 593 - DNA, 1122 bp, Adenovirus B14a
  MISC_FEATURE (1)..(1122): B14a.orf00049 E1B 54.9 kDa protein
atgagtcgcagacgtcctgaaaccatttggtggcatgaggtccagaaagagggaagggatgaagtttctgtattgcaggagaaatattcactggaacaggtgaaaacatgttggttggagcctgaggatgattgggaggtggccattaaaaattatgccaagatagctttgaggcctgataaacagtataagattactagacggattaatatccggaatgcttgttacatatctggaaatggggctgaggtggtaatagatactccagacaagacagttattagatgctgcatgatggatatgtggcctggagtagtcggtatggaagcagtaacttttgtaaatgttaagtttaggggagatggttataatggaatagtgtttatggccaataccaaacttatattgcatggttgtagcttttttggttttaacaatacctgtgtagatgcctggggacaggttagtgtacggggatgtagtttctatgcgtgttggattgccacagctggcagaaccaagagtcaattgtctctgaagaaatgcatattccaaagatgtaacctgggcattcttaatgaaggcgaagcaagggtccgccactgcgcttctacagatactggatgttttattttaattaagggcaatgccagcgtaaagcataacatgatttgcggtgcttccgatgagaggccttatcaaatgctcacttgtgccggagggcattgtaacatgctggctactgtgcatattgtttctcatcaacgcaaaaaatggcctgtttttgatcacaatgtgttgaccaagtgtaccatgcatgcaggtgggcgtagaggaatgtttatgccttaccagtgtaacatgaatcatgtaaaagtgttgttggaaccagatgccttttccagaatgagtctaacaggaatgtttgacatgaacatgcaaatctggaagatcctgaggtatgatgatacaagatcgagggtgcgcgcatgcgaatgcggaggcaagcatgccaggttccagccggtgtgtgtagatgtgactgaagatctgagaccggatcatttggttattgcccgcactggagcagagttcggatccagtggagaagaaactgactaa

SEQ ID NO: 594 - DNA, 543 bp, Adenovirus B14a
  MISC_FEATURE (1)..(543): B14a.orf00050 E1B 20 kDa protein
atggaggtttgggccattttggaagaccttagaaagactaggcaactgttagagaacgcttcggacggagtctccggtttttggagattctggttcgctagtgaattagctagggtagtttttaggataaaacaggactataaagaagaatttgaaaagttgttggtagattgtccaggactttttgaagctcttaatttgggccatcaagttcactttaaagaaaaagttttatcagttttagacttttcgaccccaggtagaactgccgctgctgtggcttttcttacttttatattagataaatggatcccgcagactcatttcagcaggggatacgttttggatttcgtagccacagcattgtggagaacatggaaggttcgcaagatgaggacaatcttaggttactggccagtgcagcctttgggtgtagcgggaatcctgaggcatccaccggtcatgccagcggttctggaggaggaacagcaagaggacaacccgagagccggcctggaccctccagtggaggaggcggagtag

SEQ ID NO: 595 - DNA, 240 bp, Adenovirus B14a
  MISC_FEATURE (1)..(240): B14a.orf00051 E1A 25.7 kDa protein
ttgagtgggaaatttgtgcttcttattataggtcctgtgtctgatgctgatgagtcaccatctcctgattctactacctcacctcctgagattcaagcacctgttcctgtggacgtgcacaagcccattcctgtaaagcttaagcctggaaaacgtccagcagtggaaaaactcgaggacttgttacagggtggggacggacctttggacttgagtacacggaaacggccaagacaataa

SEQ ID NO: 596 - DNA, 591 bp, Adenovirus B14a
  MISC_FEATURE (1)..(591): B14a.orf00052 E1A 29.1 kDa protein
atgagacacttgcgatttatgcctcaggaaataatttctgctgagactggaaacgaaatactggagtttgtggtgcacgccctgatgggagacgatccggagccacctgtgcagctttttgagcctcctacgcttcaggaactgtatgatttagaggtagagggatcggaggattctaatgaggaagctgtgaatggcttttttaccgattctatgcttttagctgctaatgaaggattagaattagatccgcctttggacactttcgatactccaggggtgattgtggaaagcggtacaggtgtaagaaaattacctgatttgggttccgtggactgtgatttgcactgctatgaagacgggtttcctttgagtgatgaggaggaccatgaaaaggagcagtctatgcagactgcagcgggtgagggagtgaaggctgccattggttttcagttggattgcccggagcttcctggacatggctgtaagtcttgtgaatttcacaggaaaaatactggagtaaaggaactgttatgttcgctttgttatatgagagcgcactgccactttatttacagtaagtgtgtttaa

SEQ ID NO: 597 - DNA, 129 bp, Artificial Sequence
  B14a.orf00054 hypothetical protein
ttgcgtcacatttaccgcgacaacttgcaaaaacactccacccccaaaaaacgtcattttcccacggccgcgccgccccttttagccgttaaccccacagccaattaccacacagcccacactttttaa

SEQ ID NO: 598 - DNA, 120 bp, Adenovirus B14b
  MISC_FEATURE (1)..(120): B14b.orf00001 E1A 6.5 kDa protein
ttgtgtcaagaggccactcttgagtgccagcgagaagagttttctcctctgcgccggcagtttaatattaaaaaaaatgagacacttgcgatttatgcctcaggaaataatttctgctga

SEQ ID NO: 599 - DNA, 198 bp, Adenovirus B14b
  MISC_FEATURE (1)..(198): B14b.orf00002 E1A 25.7 kDa protein
atgcctcaggaaataatttctgctgagactggaaacgaaatactggagtttgtggtgcacgccctgatgggagacgatccggagccacctgtgcagctttttgagcctcctacgcttcaggaactgtatgatttagaggtagagggatcggaggattctaatgaggaagctgtgaatggcttttttaccgatcaataa

SEQ ID NO: 600 - DNA, 177 bp, Artificial Sequence; identical to SEQ ID NO: 565
  B14b.orf00003 hypothetical protein

SEQ ID NO: 601 - DNA, 378 bp, Adenovirus B14b; identical to SEQ ID NO: 566
  MISC_FEATURE (1)..(378): B14b.orf00004 E4 ORF1 protein

SEQ ID NO: 602 - DNA, 429 bp, Adenovirus B14b; identical to SEQ ID NO: 567
  MISC_FEATURE (1)..(429): B14b.orf00006 E4 ORF2 protein

SEQ ID NO: 603 - DNA, 354 bp, Adenovirus B14b; identical to SEQ ID NO: 568
  MISC_FEATURE (1)..(354): B14b.orf00007 E4 ORF3 protein

SEQ ID NO: 604 - DNA, 900 bp, Adenovirus B14b; identical to SEQ ID NO: 569
  MISC_FEATURE (1)..(900): B14b.orf00010 E4 ORF6 protein

SEQ ID NO: 605 - DNA, 252 bp, Adenovirus B14b; identical to SEQ ID NO: 570
  MISC_FEATURE (1)..(252): B14b.orf00011 E4 ORF6/7 protein

SEQ ID NO: 606 - DNA, 978 bp, Adenovirus B14b; identical to SEQ ID NO: 138
  MISC_FEATURE (1)..(978): B14b.orf00012 L5 fiber protein

SEQ ID NO: 607 - DNA, 165 bp, Adenovirus B14b; identical to SEQ ID NO: 572
  MISC_FEATURE (1)..(165): B14b.orf00013 U protein

SEQ ID NO: 608 - DNA, 408 bp, Adenovirus B14b
  MISC_FEATURE (1)..(408): B14b.orf00015 E3B 15.3K protein
atgactgaaacactcaccacctccaattccgccgaggatctgcttgatatggacggccgcgtctcagaacagcgactcgcccaactacgcatccgccagcagcaggaacgcgtggccaaagagctcagagatgtcatccaaattcaccaatgcaaaaaaggcatattctgtttggtaaaacaagccaaaatatcctacgagatcaccgctaccgaccatcgcctctcttacgagcttggcccccaacgacaaaaatttacctgcatggtgggaatcaaccccatagttatcacccaacaaagtggagatactaagggttgcattcactgctcctgcgattccatcgagtgcacctacaccctgctgaagaccctatgcggactaagagacctgctacccatgaattaa

SEQ ID NO: 609 - DNA, 372 bp, Adenovirus B14b
  MISC_FEATURE (1)..(372): B14b.orf00016 E3 14.9 kDa protein
ttgcttccctacgctgtctcaaccccagctacctatagtactccaccagaacaccttagaaaatgcaaattccaacaaccgtggtcatttcttgcttgctatcgagaaaaatctgaaattcccccaactttaataatgattgctggaataattaatgtaatctgttgcaccataatttcatttctgatataccccctatttgattttggctggaatgctcccaatgcacatgattattcccaagacccagaggaacacattcccctacataacatgcaacaaccaatagcgctaatagaatacgaaagtgaaccacaacccccactactccctgctattagttacttcaacctaaccggcggagatgactga

SEQ ID NO: 610 - DNA, 276 bp, Adenovirus B14b
  MISC_FEATURE (1)..(276): B14b.orf00017 E3 10.1 kDa protein
atggtacctagaaatttcttcttcaccatactcatctgtgcttttaatgtttgcgctactttcacagcagtagccacagcaagcccagactgtataggagcatttgcttcctatgcactttttgcttttgtcacttgcatctgcgtatgtagcatagtctgcctggttattaattttttccaacttctagactggatccttgtgcgaattgcctacctgcgccaccatcccgaataccgcaaccaaaatatcgcggcacttcttagacttatctaa

SEQ ID NO: 611 - DNA, 552 bp, Adenovirus B14b
  MISC_FEATURE (1)..(552): B14b.orf00020 E3 20.8 kDa protein
atggtttccactaccacattccttatgcttactagtatagcaactctgacttctgctcgctcacacctcactgtaactataggctcaaactgcacactaaaaggacctcaaggtggtcatgtcttttggtggagaatatatgacaatggatggtttacaaaaccatgtgaccaacctggtagatttttctgcaacggcagagacctaaccattatcaacgtgacagcaaatgacaaaggcttctattatggaaccgactataaaagtagtttagattataacattattgtactgccatccaccactccagcgccccgcaaaactactttctctagcagcagtgccgctaacaatacaatttccaatccaacctttaccgcgcttttaaaacgcactgtgaataattctacaacaatttccacttcaacaatcagcatcatcgctgccgtgacaattggaatatctattcttgtttttaccataacctactacacctgctgctataaaaaagacgaacataaaggtgatccattacttagatttgatatttaa

SEQ ID NO: 612 - DNA, 546 bp, Adenovirus B14b
  MISC_FEATURE (1)..(546): B14b.orf00021 E3 20.1 kDa protein
atggcttttcttacagctctcatacttgtcagcattgtcactgccgctcacggacaaacagtcgtctctatccctctaggtcataattacactctcataggacccccaatcacttcagaggtcatctggaccaaactgggaagcgttgattactttgatataatctgtaacaaaacaaaaccaataatagtaacctgcaacatacaaaatcttacattaattaatgttagcaaagtttacagcggttactattatggttatgacagatacagtagtcaatatagaaattacttggttcgtgttacccagtccaaaaccacgaaaatgccaaatatggcagaaattcgatccgatgacaattctctagaaacttttacatcttccaccacacctgacgaaaaaaatatcccagattcaatgattgcaattatcgcagcggtggcagtggtgatggcactaacagtaatatgcatgcttttatatgcttgtcgctacaaaaagtttcatcctaaaaaacaagatctcctactaaggcttaacatttaa

SEQ ID NO: 613 - DNA, 501 bp, Adenovirus B14b
  MISC_FEATURE (1)..(501): B14b.orf00022 E3 18.4 kDa protein
atggggcccatactagtcttgcttgttttactttcgcttttgggaccgggttctgccaactacaatccatgtctagactttgacccagaaaactgcacacttacttttgcacccgacacaagccgcatctgtggagttcttattaagtgcggatgggaatgcaggtccgttgaaattacacacaataacaaaacctggaacaataccttatccaccacatgggagccaggagttcccgagtggtacactgtctctgtccgaggtcctgacggttccatccgcattagtaacaacacttttattttttctacaatgtgcgatctggccatgttcatgagcaaacagtattctctatggcctcccagcaaggacaacattgtaacgttctccattgcttattgcttgtgcgcttgccttcttactgctttactgtgcgtatgcatacacctgcttgtaaccactcgtatcaaaaacgccaataacaaagaaaaaatgccttaa

SEQ ID NO: 614 - DNA, 396 bp, Adenovirus B14b; identical to SEQ ID NO: 574
  MISC_FEATURE (1)..(396): B14b.orf00024 E3 14.6 kDa protein

SEQ ID NO: 615 - DNA, 318 bp, Adenovirus B14b; identical to SEQ ID NO: 575
  MISC_FEATURE (1)..(318): B14b.orf00025 E3 11.7 kDa protein

SEQ ID NO: 616 - DNA, 684 bp, Adenovirus B14b; identical to SEQ ID NO: 576
  MISC_FEATURE (1)..(684): B14b.orf00026 L4 protein VIII

SEQ ID NO: 617 - DNA, 393 bp, Adenovirus B14b; identical to SEQ ID NO: 577
  MISC_FEATURE (1)..(393): B14b.orf00027 L4 33 kDa protein

SEQ ID NO: 618 - DNA, 2439 bp, Adenovirus B14b; identical to SEQ ID NO: 578
  MISC_FEATURE (1)..(2439): B14b.orf00030 L4 100 kDa hexon-assembly associated protein

SEQ ID NO: 619 - DNA, 1557 bp, Adenovirus B14b; identical to SEQ ID NO: 579
  MISC_FEATURE (1)..(1557): B14b.orf00031 E2A DNA binding protein

SEQ ID NO: 620 - DNA, 651 bp, Adenovirus B14b; identical to SEQ ID NO: 580
  MISC_FEATURE (1)..(651): B14b.orf00032 L3 23K proteinase

SEQ ID NO: 621 - DNA, 2838 bp, Adenovirus B14b; identical to SEQ ID NO: 198
  MISC_FEATURE (1)..(2838): B14b.orf00035 L3 hexon protein

SEQ ID NO: 622 - DNA, 741 bp, Adenovirus B14b; identical to SEQ ID NO: 582
  MISC_FEATURE (1)..(741): B14b.orf00038 L3 protein VI

SEQ ID NO: 623 - DNA, 231 bp, Adenovirus B14b; identical to SEQ ID NO: 583
  MISC_FEATURE (1)..(231): B14b.orf00040 L2 protein X

SEQ ID NO: 624 - DNA, 1056 bp, Adenovirus B14b; identical to SEQ ID NO: 584
  MISC_FEATURE (1)..(1056): B14b.orf00041 L2 protein V

SEQ ID NO: 625 - DNA, 579 bp, Adenovirus B14b; identical to SEQ ID NO: 585
  MISC_FEATURE (1)..(579): B14b.orf00042 L2 protein VII

SEQ ID NO: 626 - DNA, 1677 bp, Adenovirus B14b; identical to SEQ ID NO: 171
  MISC_FEATURE (1)..(1677): B14b.orf00043 L2 penton protein

SEQ ID NO: 627 - DNA, 1764 bp, Adenovirus B14b; identical to SEQ ID NO: 587
  MISC_FEATURE (1)..(1764): B14b.orf00047 L1 protein IIIa

SEQ ID NO: 628 - DNA, 1161 bp, Adenovirus B14b; identical to SEQ ID NO: 588
  MISC_FEATURE (1)..(1161): B14b.orf00050 L1 43 kDa protein

SEQ ID NO: 629 - DNA, 1917 bp, Adenovirus B14b; identical to SEQ ID NO: 589
  MISC_FEATURE (1)..(1917): B14b.orf00051 E2B terminal protein

SEQ ID NO: 630 - DNA, 3369 bp, Adenovirus B14b; identical to SEQ ID NO: 590
  MISC_FEATURE (1)..(3369): B14b.orf00052 E2B DNA polymerase

SEQ ID NO: 631 - DNA, 1041 bp, Adenovirus B14b
  MISC_FEATURE (1)..(1041): B14b.orf00053 IVa2 protein
atggctgacggtctaaaaccgctgaaaaacttttcctcactacaagaacttctatcactaggaggagagcgcctcctaatggatttggtgcgggaaaatatgcatgtaagggaaatgatgaacgaggtggcccccttgcttcgagaagacggcagttgccgttccctaaactaccaactgcaacctgtaatcggaatcatttatggccccaccggatgtggcaaatctcaattgctcagaaacttgctatcatcccaactaattaccccagccccagaaacggtgttctttatagccccccaggtggacatgattccaccctcggaactgaaagcttgggaaatgcaaatctgtgaggggaactatgctccggggcccgaaggaacattcataccccaatcgggtactctccgtcccaaatttattaaaatggcctatgatgatttaactcaggaacataactatgatgtgtcagacccacggaacgtgtttgcccgcgctgctgcccacggccctattgctattatcatggatgagtgcatggaaaatctcggaggacacaagggtgtctccaaatttttccacgcttttccatccaagctgcacgataaatttcctaaatgtaccggatacaccgtcttggtggtacttcataacatgaacccaagacgagatcttggcggcaatattgccaacttaaaaatccaatccaaaatgcacataatttcaccccgaatgcacccctcccagctcaaccggtttgtaaacacctacaccaagggcttatctgtggcaatcagcctacttctaaaagatattgtgcaacaccatgcacagcgaccttgttatgactgggtaatttacaacactaccccggagcatgaatcccttcaatggagctatctccaccccaaagacggcctaatgcccatgtatctaaacattcaatcccacctttataggattttggaaaaaatccaccgtgttctcaatgatcgagatcggtggtctagggcataccgtgcgcgaaaaatgaaataa

SEQ ID NO: 632 - DNA, 465 bp, Adenovirus B14b
  MISC_FEATURE (1)..(465): B14b.orf00054 IX pIX protein
atggacagattgagtaaaaatttgtttttctgtcttgcagctgtcatgagtggaaacgcttcttttaatgggggagtcttcagcccttatctgacagggcgtctcccatcctgggcaggagttcgtcagaatgttatgggatctactgtggatggaagacccgtccaacccgccaattcttcaacgctgacctatgctactttaagttcttcacctttggacgcagctgcagccgccgctgccgcctctgttgccgctaacactgtgcttggaatgggttactatggaagcatcctggctaattccacttcctctaataacccttctaccctgactcaggacaagttacttgtccttttggcccagctggaggctttgacccaacgtctgggtgaactttctcagcaggtggccgagttgcgagtacaaactgagtctgctgtcggcacggcaaagtctaaataa

SEQ ID NO: 633 - DNA, 1221 bp, Adenovirus B14b
  MISC_FEATURE (1)..(1221): B14b.orf00057 E1B 54.9 kDa protein
gtgcttactggatctacgtccactggacgggataggggcgttaaaagggagagggcatctagtggtactgatgctagatctgagttggctttaagtttaatgagtcgcagacgtcctgaaaccatttggtggcatgaggtccagaaagagggaagggatgaagtttctgtattgcaggagaaatattcactggaacaggtgaaaacatgttggttggagcctgaggatgattgggaggtggccattaaaaattatgccaagatagctttgaggcctgataaacagtataagattactagacggattaatatccggaatgcttgttacatatctggaaatggggctgaggtggtaatagatactccagacaagacagttattagatgctgcatgatggatatgtggcctggagtagtcggtatggaagcagtaacttttgtaaatgttaagtttaggggagatggttataatggaatagtgtttatggccaataccaaacttatattgcatggttgtagcttttttggttttaacaatacctgtgtagatgcctggggacaggttagtgtacggggatgtagtttctatgcgtgttggattgccacagctggcagaaccaagagtcaattgtctctgaagaaatgcatattccaaagatgtaacctgggcattcttaatgaaggcgaagcaagggtccgccactgcgcttctacagatactggatgttttattttaattaagggcaatgccagcgtaaagcataacatgatttgcggtgcttccgatgagaggccttatcaaatgctcacttgtgccggagggcattgtaacatgctggctactgtgcatattgtttctcatcaacgcaaaaaatggcctgtttttgatcacaatgtgttgaccaagtgtaccatgcatgcaggtgggcgtagaggaatgtttatgccttaccagtgtaacatgaatcatgtaaaagtgttgttggaaccagatgccttttccagaatgagtctaacaggaatgtttgacatgaacatgcaaatctggaagatcctgaggtatgatgatacaagatcgagggtgcgcgcatgcgaatgcggaggcaagcatgccaggttccagccggtgtgtgtagatgtgactgaagatctgagaccggatcatttggttattgcccgcactggagcagagttcggatccagtggagaagaaactgactaa

SEQ ID NO: 634 - DNA, 543 bp, Adenovirus B14b; identical to SEQ ID NO: 594
  MISC_FEATURE (1)..(543): B14b.orf00058 E1B 20 kDa protein

SEQ ID NO: 635 - DNA, 225 bp, Adenovirus B14b
  MISC_FEATURE (1)..(225): B14b.orf00060 E1A 25.7 kDa protein
gtgcttcttattataggtcctgtgtctgatgctgatgagtcaccatctcctgattctactacctcacctcctgagattcaagcacctgttcctgtggacgtgcacaagcccattcctgtaaagcttaagcctggaaaacgtccagcagtggaaaaactcgaggacttgttacagggtggggacggacctttggacttgagtacacggaaacggccaagacaataa

SEQ ID NO: 636 - DNA, 573 bp, Adenovirus B14b
  MISC_FEATURE (1)..(573): B14b.orf00061 E1A 29.1 kDa protein
atgcctcaggaaataatttctgctgagactggaaacgaaatactggagtttgtggtgcacgccctgatgggagacgatccggagccacctgtgcagctttttgagcctcctacgcttcaggaactgtatgatttagaggtagagggatcggaggattctaatgaggaagctgtgaatggcttttttaccgattctatgcttttagctgctaatgaaggattagaattagatccgcctttggacactttcgatactccaggggtgattgtggaaagcggtacaggtgtaagaaaattacctgatttgggttccgtggactgtgatttgcactgctatgaagacgggtttcctttgagtgatgaggaggaccatgaaaaggagcagtctatgcagactgcagcgggtgagggagtgaaggctgccattggttttcagttggattgcccggagcttcctggacatggctgtaagtcttgtgaatttcacaggaaaaatactggagtaaaggaactgttatgttcgctttgttatatgagagcgcactgccactttatttacagtaagtgtgtttaa

SEQ ID NO: 637 - DNA, 120 bp, Adenovirus B14b; identical to SEQ ID NO: 598
  MISC_FEATURE (1)..(120): B14b.orf00062 E1A 6.5 kDa protein

SEQ ID NO: 638 - DNA, 129 bp, Artificial Sequence; identical to SEQ ID NO: 597
  B14b.orf00064 hypothetical protein

SEQ ID NO: 639 - DNA, 378 bp, Adenovirus B34
  MISC_FEATURE (1)..(378): B34.orf00002 E4 ORF1 protein
atggctgatgaggctttgtatgtgtatttagagggaccgggggcgacgttgcctgaacagcagcagagaaataattatattttttattctcctgtgccttttactttgtatccgcgaggggtggctttgctatacttacgattaagcataattatacccaaaggctatgttggctgttttttctcgttaactgatgctaacatgtctggattgtatgcttcatcaagaattattcatgctggtcaccgcgaggaactttcggtgctgttgtttaatcaccatgacaggttttacgagggtcgagctggagaccctgtggcttgtcttgtgatggaaagactgatttatccacctgttcgtcaggctactatgatatga

SEQ ID NO: 640 - DNA, 390 bp, Adenovirus B34; identical to SEQ ID NO: 527
  MISC_FEATURE (1)..(390): B34.orf00003 E4 130 aa

SEQ ID NO: 641 - DNA, 354 bp, Adenovirus B34
  MISC_FEATURE (1)..(354): B34.orf00004 E4 117 aa
atgagggtgtgtttaagaatggtggtggagggcgccctccgggacctgtttgtaatgtgtggattggatttaccacaagaactgacacgaataattcaaggctggaaagctgaaaattatctgggaatggtgcaggaatgtaatatgatgattgaggagttagaaaatgctccttcttttggtattcttttgttcttggatgtgcgcgtggaggctttgttggaagccaccgttgagcaccttgaaaatcgcatttcttttgatttagctgtgctttttcaccaacacagtgggggcgagagatgccatctgcgcgatctacaatttgaagtactgcgagatcgtttggaataa

SEQ ID NO: 642 - DNA, 900 bp, Adenovirus B34
  MISC_FEATURE (1)..(900): B34.orf00007 E4 ORF6 protein
atgtcaggaagcaactccattatgacaaggttgcgcgcacgctcgacatcatgcgccagacatcacccttacaccagagcccagttaccacgttgtgaggaaaatgaaacccgagcttctatgactgaagaccacccgctgttgccagattgtgatactatgactatgcatagtgtaagttgtgttcgtggtcttccttgttctgccagctttactgttctgcaagagcttcctattccctgggatatgtttctaaatcctgaggagttaaaaattatgagaagatgcatgcatttatgtctatgttgtgccactatagatatttttcattctcaagtgattcacggtcgagagaattgggttcttcattgtcattgtaatcagcagggttcacttcaatgcatggctgggggagcggtgttggcagtgtggttccggaaggttatattgggttgcatgattaaccaacgttgtccatggtacagacagattgttaatatgcacatgccaaaagagatcatgtatgtgggtagtgtgtttttgagggaacgtcatttaatttatattaaactttggtatgatggtcatgcaggggcgattatatcagatatgagttttggctggagcgcttttaattatggtttattaaacaatattgtaataatgtgttgtacctactgcaaagatttgagtgaaatcagaatgcgttgctgcgcgcatcgcaccagaaagttgatgttaagggctattaaaatcatgcttcaggacactgtggaccctgatcccataaacagcagttgcacggagcgacgcagacagcggctgcttgtgggtttgatgagacacaatcgtccgataccgttttcggattatgattcccatcgttcttcttccagatga

SEQ ID NO: 643 - DNA, 252 bp, Adenovirus B34
  MISC_FEATURE (1)..(252): B34.orf00008 E4 ORF6/7 protein
atgaccgtgatccagactccggattcgcatccgcagcagttggactgtgaaagcgctttaaaagactatcgcgatggatttttatctatcactgaccccagattggctcgctctgaaactgtttggaatgtggaatctaaaacaatgtctatctctaatggtatccaaatgtttaaagctgtgcgtggggagagattggtgtattctgtcaaatgggaaggtggaggcaaaataactactcgaattttgtga

SEQ ID NO: 644 - DNA, 972 bp, Adenovirus B34; identical to SEQ ID NO: 140
  MISC_FEATURE (1)..(972): B34.orf00009 L5 fiber protein

SEQ ID NO: 645 - DNA, 165 bp, Adenovirus B34; identical to SEQ ID NO: 532
  MISC_FEATURE (1)..(165): B34.orf00010 U protein

SEQ ID NO: 646 - DNA, 408 bp, Adenovirus B34
  MISC_FEATURE (1)..(408): B34.orf00012 E3B 15.3K protein
atgactgaaacactcaccacctccaattccgccgaggatctgctcgatatggacggccgcgtctcagaacagcgacttgcccaactacgcatccgccagcagcaggaacgcgcggccaaagagctcagagatgtcatccaaattcaccaatgcaaaaaaggcatattctgtttggtaaaacaagccaagatatcctacgagatcaccgctactgaccatcgcctctcttacgaacttggcccccaacgacaaaaatttacctgcatggtgggaatcaaccccatagttatcacccagcaaagtggagatactaagggttgcattcactgctcctgcgattccatcgagtgcacctacaccctgctgaagaccctatgcggcctaagagacctgctaccaatgaattaa

SEQ ID NO: 647 - DNA, 405 bp, Adenovirus B34; identical to SEQ ID NO: 534
  MISC_FEATURE (1)..(405): B34.orf00013 E3 14.9 kDa protein

SEQ ID NO: 648 - DNA, 276 bp, Adenovirus B34
  MISC_FEATURE (1)..(276): B34.orf00014 E3B 10.3K protein
atggtacctagaaatttcttcttcaccatactcatttgtgcatttaatgtttgcgctactttcacagcagtagccacagcaaccccagactgtataggagcatttgcttcctatgcactttttgcttttgttacttgcatctgcgtatgtagcatagtctgcctggttattaattttttccaacttctagactggatccttgtgcgaattgcctacctgcgccaccatcccgaataccgcaaccaaaatatcgcggcacttcttagactcatctaa

SEQ ID NO: 649 - DNA, 564 bp, Adenovirus B34
  MISC_FEATURE (1)..(564): B34.orf00016 E3A 20.6K protein
atggtttccactaccacattccttatgcttactagtcttgcaactctgacttctgctcgctcacacctcactgtaactataggctcaaactgcacactaaaaggacctcaaggtggtcatgtcttttggtggagaatatatgacaatggatggtttacaaaaccatgtgaccaacctggtagatttttctgcaacggcagagacctaaccattatcaacgtgacagcaaatgacaaaggcttctattatggaaccgactataaaagtagtttagattataacattattgtactgccatctaccactccagcaccccgcacaactactttctctagcagcagtgtcgctaacaatacaatttccaatccaacctttgccgcgcttttaaaacgcactgtgaataattctacaacttcacatacaacaatttccacttcaacaatcagcattatcgctgcagtgacaattggaatatctattcttgtttttaccataacctactacgcctgctgctatagaaaagacaaacataaaggtgatccattacttagatttgatatttaa

SEQ ID NO: 650 - DNA, 546 bp, Adenovirus B34
  MISC_FEATURE (1)..(546): B34.orf00017 E3A 20.3K protein
atggcttctcttacatctctcatatttgtcagcattgtcactgccgctcacggacaaacagtcgtctctatccctctaggacataattacactctcataggacccccaatcacttcagaggtcatctggaccaaactgggaagcgttgattactttgatataatctgcaacaaaacaaaaccaataatagtaacttgcaacatacaaaatcttacattgattaatgttagcaaagtttacagcggttactattatggttatgacagatacagtagtcaatatagaaattacttggttcgtgttacccagttaaaaaccacgaaaatgccaaatatggcaaagattcgatccgatgacaattctctagaaacttttacatctcccaccacacccgacgaaaaaaacatcccagattcaatgattgcaattgttgcagcggtggcagtggtgatggcactaataataatatgcatgcttttatatgcttgtcgctacaaaaagtttcatcctaaaaaacaagatctcctactaaggcttaacatttaa

SEQ ID NO: 651 - DNA, 501 bp, Adenovirus B34; identical to SEQ ID NO: 538
  MISC_FEATURE (1)..(501): B34.orf00019 E3A 18.5K protein

SEQ ID NO: 652 - DNA, 396 bp, Adenovirus B34
  MISC_FEATURE (1)..(396): B34.orf00021 E3 14.6 kDa protein
atgaaagcctttgctgtcttatgtgtactgagtttaataaaaactgaattaagactctcctacggactgccgcttcttcaacccggattttacaaccagaagaacgaaacttttcctgtcgtccaggactctgttaacttcacctttcctactcacaaactagaagctcaacgactacaccgcttttccagaagcattttccctactaatactactttcaaaaccggaggtgagctccaaggtcttcctacagaaaacccttgggtggaagcgggccttgtagtgctaggaattcttgcgggtgggcttgtgattattctttgctacctatacacaccttgcttcactttcctagtggtgttgtggtattggtttaaaaaatggggcccatactag

SEQ ID NO: 653 - DNA, 318 bp, Adenovirus B34
  MISC_FEATURE (1)..(318): B34.orf00022 E3 11.7 kDa protein
atgtctggtgacgcggctgagctatctcggctgcgacatctagaccactgccgccgctttcgctgctttgcccgggaactcattgagttcatctacttcgaactccccaaggatcaccctcaaggtccggcccacggagtgcggattactatcgaaggcaaaatacactctcgcctgcaacgaattttctcccagcggcccgtgctgatcgagcgagaccagggaaacaccacggtttccatctactgcatttgtaatcaccccggattgcatgaaagcctttgctgtcttatgtgtactgagtttaataaaaactga

SEQ ID NO: 654 - DNA, 684 bp, Adenovirus B34
  MISC_FEATURE (1)..(684): B34.orf00023 L4 protein VIII hexon associated protein
atgagtaaagaaattcccacgccttacatgtggagttatcagccccaaatgggattggcggcaggcgcctcccaggactactccacccgcatgaattggctcagcgccgggccttctatgatttctcgagttaatgatatacgcgcctaccgaaaccaaatacttttggaacagtcagctcttaccaccacgccccgccaacaccttaatcccagaaattggcccgccgccctagtgtaccaggaaagtcccgctcccaccactgtattacttcctcgagacgcccaggccgaagtccaaatgactaatgcaggtgcgcagttagcgggcggctccaccctatgtcgtcacaggcctcggcataatataaaacgcctgatgatcagaggccgaggtatccagctcaacgacgagtcggtgagctctccgcttggtctacgaccagacggaatctttcagattgccggctgcgggagatcttccttcacccctcgtcaggctgttctgactttggaaagttcgtcttcgcaaccccgctcgggcggaatcgggaccgttcaatttgtggaggagtttactccctctgtctacttcaaccccttctccggatctcctgggcactacccggacgagttcataccgaacttcgacgcgattagcgagtcagtggacggctacgattga

SEQ ID NO: 655 - DNA, 393 bp, Adenovirus B34
  MISC_FEATURE (1)..(393): B34.orf00024 L4 33K protein
atgttttgcattactaccgtcacctccacagcccctactatagccagcaaatcccggcagtctcgacagataaagacagcggcggcgacctccaacagaaaaccagcagcggcagttagaaaatacacaacaagtgcagcaacaggaggattaaagattacagccaacgagccagcgcaaacccgagagttaagaaatcggatctttccaaccctgtatgccatcttccagcagagtcggggccaagagcaggaactgaaaataaaaaaccgatctctgcgttcgctcaccagaagttgtttgtatcacaagagcgaagatcaacttcagcgcactctcgaggacgccgaggctctcttcaacaagtactgcgcgctgactcttaaagagtag

SEQ ID NO: 656 - DNA, 2442 bp, Adenovirus B34
  MISC_FEATURE (1)..(2442): B34.orf00027 L4 100 kDa hexon-assembly associated protein
atggaaactcagccattgctgtcaacatcgccacgagtgccatcacatctcgtcctcagcgacgaggaaaaggagcagagcttaagcattccaccgcccagtcctgccaccacctctaccctagaagataaggaggtcgacgcatctcatgacatgcagaataaaaaagcgaaagagtctgagccagacatcgaacaagacccgggctatgtgacaccggtggaacacgaggaagagttgaaacgctttctagagagagaggatgaaaactgcccaaaacagcaagcggataactatcaccaagatgctggaaatagggatcagaacaccgactacctcatagggcttgacggggaagacgcgctccttaaacatctagcaagacagtcactcatagtcaaggatgcattattggacagaactgaagtgcccatcagtgtcgaagagctcagccgcgcctacgagcttaacctattttcacctcgtactccccccaaacgtcagccaaacggcacctgcgagccaaatcctcgcttaaacttttatccagcttttgctgtgccagaagtactggctacctatcacatcttttttaaaaatcaaaaaattccagtctcctgccgcgctaatcgcacccgcgccgatgccctactcaatctgggacctggttcacgcttacctgatatagcttccttggaagaggttccaaagatcttcgagggtctgggcaataatgagactcgggccgcaaatgctctgcaaaagggagaaaatggcatggatgagcatcacagcgttctggtggaattggaaggcgataatgccagactcgcagtactcaagcgaagcgtcgaggtcacacactttgcataccccgctgtcaacctgccccctaaagtcatgacggccgtcatggaccagttactcattaagcgcgcaagtcccctttcagaagacatgcatgacccagatgcctgtgatgagggtaaaccagtggtcagtgatgagcagctaacccgatggctgggcaccgactctccccgggatttggaagagcgtcgcaagcttatgatggccgtggtgctggttaccgtagaactagagtgtcttcggcgtttctttaccgattcagaaaccttgcgcaaactcgaagagaatctgcactacacttttagacacggctttgtgcggcaggcatgcaagatatctaacgtggaactcaccaacctggtttcctacatgggtattctgcatgagaatcgcctaggacaaagcgtgctgcacagcacccttaagggggaagcccgccgtgattacatccgcgattgtgtttatctctacctgtgccacacgtggcaaaccggcatgggtgtatggcagcaatgtttagaagaacagaacctgaaagagctaaacaagctcttacagaaatctcttaaggttctgtggacagggttcgacgagcgcaccgtcgcttccgacctggcagacctcatcttcccagagcgtctcagggttactttgcgaaacggactgcctgactttatgagccagagcatgcttaacaattttcgctctttcatcctggaacgctccggtatcctgcccgccacctgctgcgcactgccctccgactttgtgcctctcacctaccgcgaatgccccccgccgctatggagtcactgctacctgttccgtctggccaactacctctcctaccactcggatgtgatcgaggatgtgagcggagacggcttgctggagtgtcactgccgctgcaatctgtgcacgccccaccggtccctagcttgcaacccccagttgatgagcgaaacccagataataggcacctttgaattgcaaggccccagcagccaaggcgatgggtcttctcctgggcaaagtttaaaactgaccccgggactgtggacctccgcctacttgcgcaagtttgccccggaagattaccacccctatgaaatcaagttctatgaggaccaatcacagcctccgaaagccgaactttcggcctgcgtcatcacccagggggcaattctggcccaattgcaagccatccaaaaatcccgccaagaatttctactgaaaaagggtaagggggtctaccttgacccccagaccggcgaggaactcaacacaaggttccctcaggatgtcccaacgacgagaaagcaagaagttgaaggtgcagccgccgcccccagaagatatggaggaagattgggacagtcaggcagaggaagcggaggaggaggacagtctggaggacagtctggaggaagacagtttggaggaggaaaacgaggaggcagaggaggtggaagaagtaaccgccgacaaacagttatcctcggctgcggagacaagcaacagcgctaccatctccgctccgagtcgaggaacccggcggcgtcccagcagtag

SEQ ID NO: 657 - DNA, 1557 bp, Adenovirus B34
  MISC_FEATURE (1)..(1557): B34.orf00029 E2A DNA binding protein
atggccagccgcgaaggaaatcagttaagcgaccgccacagggagcacacccccgaacgcggaaggggttctgccagtcatccgccttccaggtcggaccgcagcccttcgcaatcgcctccacctctgcccccgaagagaaacacctgtcgccgtgtggggtcaggttcttctaccgacagtcagttggtaatggtgagcgaaacgtcacaatcctccctgtctccggaacggagcgacagtcctcctcctccgatacccccgaaaaagaagccaaggaagaccaaacatgtccccatgcaagacatcagtcaagacagcgaagaagaaagagaagaggcgcaacttgtagcagtgggtttcagctacccgcccgtgcgcatcgttgagaaggatggcaaaagaagcattgagaagatcgccaaagatgaccctctggctaaaggagctgctgcctgcactgttaagaatccgattagcttgcccctggtgtctgcttgggagaaaggcatggaagtgatgtgtctgctgatggagaagtacaggctggataacgaacttagaacctcttttaaactaatgcctgagcagcacgaacaatacaagcgcatctgtcaccagtacgtgaacgaggagcaccgaggcatccagttaactttcactagtcacaagacactgagcacgatgatgggaagatttctgcagggaatgatacattctttttctcagatcgcccaccataattgggaatgtacaggctgtgcgttgtggcctcatggctgcaatgattatgagggcaagctgaagtgcttgcatggcaatattatgattcagaaggagcagattatcgagatggatgtggccagcgagaacggacaacgagccttgaaggagaatcccgagcgaaccaaaatcacccaaaaccgctggggcagaagtgtggtgcaaatagccaacaatgacgcccgctgctgtgtgaatgatgccggctgcgcagctaaccagttttcgagcaggtcctgcgggatgttttataccgagggtagtaaagcccagcaggctttcaagcaatatgatgctttcatgagagccgtgtatccaggaatcagacaggatcaggccaagatgatactgatccccctgcactgcgattgtaaccacaagcctaattgggtgcccgccatgggtaggcagacctgcaagatgaccccgttcagcattgccaatgctgaagatctggatgtgggcatgattgcagatcccaccgtgctggcaagcgtaagacatccgtcgctgatggtgtttcagtgctgcaatccggtgtaccgcaactctcgcgctcagagcactggtcctaattgtgatttcaagatttcggctcctgacctgctgggagctttgcagctgaccagaaagctgtggagtgacatcctgcccgatataccggttcccaagttggtgattcccgaattcaagtggcaacccaagtatcagttccgcaacgtatcactgcctgcgggtcattctgattctcgtcagaacccattcgacttgtaa

SEQ ID NO: 658 - DNA, 630 bp, Adenovirus B34
  MISC_FEATURE (1)..(630): B34.orf00030 L3 23 kDa protein
atggcctgcggatcccaaaacggctccagcgagcaagagctcagagccattgtccaagacctgggttgcggaccatattttttgggaacctttgataagcgcttcccggggttcatggcccccgataagctcgcctgtgccattgtaaatacggccggacgtgagacggggggagagcactggttggctttcggttggaacccacgttctaacacctgctacctttttgatccttttggattctcggatgatcgtctcaaacagatttaccagtttgaatatgagggtctcctgcgccgcagcgctcttgctaccaaggaccggtgtattacgctggaaaaatctacccagaccgtgcagggcccccgttctgccgcctgcggacttttctgctgcatgttccttcatgcctttgtgcactggcctgaccgtcccatggacggaaaccccaccatgaaattgctaactggagtgccaaacaacatgcttcattctcctaaagtccagcccaccctgtgtgacaatcaaaaagcactctaccattttctcaatacccattcgccttattttcgctctcatcgtacacacatcgaaagggccactgcgttcgaccgtatggatgtgcaataa

SEQ ID NO: 659 - DNA, 2856 bp, Adenovirus B34; identical to SEQ ID NO: 200
  MISC_FEATURE (1)..(2856): B34.orf00032 L3 hexon protein

SEQ ID NO: 660 - DNA, 741 bp, Adenovirus B34
  MISC_FEATURE (1)..(741): B34.orf00033 L3 protein
atggaagacatcaatttttcatccttggctccgcgacacggcacgaagccgtacatgggcacctggagcgacatcggcacgagccaactgaacgggggcgccttcaattggagcagtatctggagcgggcttaaaaattttggctcaaccataaaaacatacgggaacaaagcttggaacagcagtacaggacaggcgcttagaaataaacttaaagaccagaacttccaacaaaaagtagtcgatgggatagcttccggtatcaatggagtggtagatttggctaaccaggctgtgcagaaaaagataaacagtcgtttggacccgccgccagcaaccccaggtgaaatgcaagtggaggaagaaattcctccgccagaaaaacgaggcgacaagcgtccgcgtcccgatttggaagagacgctggtgacgcgcgtagatgaaccgccttcttatgaggaagcaacgaagcttggaatgcccaccactagaccgatagcccctatggccaccggggtgatgaaaccttctcagttgcatcgacccgtcaccttggatttgccccctcctcctgctgctactgctgtacccgcttctaagcctgtcgctgccccgaaaccagtcgccgtagccaggtcacgtcccgggggcgctcctcgtccaaatgcacactggcaaaatactctgaacagcatcgtgggtctaggcgtgcaaagtgtaaaacgccgtcgctgcttttaa

SEQ ID NO: 661 - DNA, 231 bp, Adenovirus B34
  MISC_FEATURE (1)..(231): B34.orf00035 L2 protein X
atggccctcacttgtcgccttcgcgttcccatcactggttaccgaggaagaaactcgcgccgtagaagagggatgttggggcgcggaatgcgacgctacaggcgacggcgtgctatccgcaagcaattgcggggtggttttttgccagccttaattccaattatcgctgctgcgattggcgcaataccaggcatagcttccgtggcggttcaggcctcgcaacgacattga

SEQ ID NO: 662 - DNA, 1056 bp, Adenovirus B34
  MISC_FEATURE (1)..(1056): B34.orf00036 L2 protein V
atgtccaagcgcaaatacaaggaagaaatgctgcaggttatcgcacctgaagtctacggccaaccgttgaaggatgaaaaaaaaccccgcaaaatcaagcgggtaaaaaaggacaaaaaagaagaggaagatggcgatgatgggctggcggagtttgtgcgcgagtttgccccacggcgacgcgtgcaatggcgtgggcgcaaagttcgacatgtgttgagacctggaacttcggtggtctttacacccggcgagcgttcaagcgctacttttaagcgttcctatgatgaggtgtacggggatgatgatattcttgagcaggcagctgaccgattaggcgagtttgcttatggcaagcgtagtagaataaatcccaaggatgaaacagtgtccatacccttggatcatggaaatcccacccctagtcttaaaccggtcactttgcagcaagtgttacccgtaactccgcgaacaggtgttaaacgcgaaggtgaagatttgtatcccactatgcaactgatggtgcccaaacgccagaagttggaggacgttttggagaaagtaaaagtggatccagatattcaacctgaggttaaagtgagacccattaagcaggtagcgcctggtctgggagtacaaactgtagacattaaaattcccactgaaagtatggaagtgcaaactgaacccgcaaagcctactgccacctccactgaagtgcaaacggacccatggatgcccatgcctattacaactgacgccgtcggtcccactcgaagatcccgacgaaagtacggtccagcaagtctgttgatgcccaactatgtcgtacacccatctattattcctactcctggttaccgaggcactcgctactatcgcagccgaaacagtacttcccgccgtcgccgcaagacacctgcaaatcgcagtcgtcgccgtagacgcacaagcaaaccgattcccggcgccctggtgcggcaagtgtaccgcaatggtagtgcggaacctttgacactgccgcgtgcgcgttaccatcctagtatcatcacttaa

SEQ ID NO: 663 - DNA, 1677 bp, Adenovirus B34; identical to SEQ ID NO: 172
  MISC_FEATURE (1)..(1677): B34.orf00038 L2 penton

SEQ ID NO: 664 - DNA, 1764 bp, Adenovirus B34
  MISC_FEATURE (1)..(1764): B34.orf00041 L1 protein IIIa
atggaacagcaagcaccggatcccgcaatgcgggcggcgctgcagagccagccgtccggcattaactcctcggacgattggacccaggccatgcaacgtatcatggcgttgacgactcgcaaccccgaagcctttagacagcaaccccaggccaaccgtctatcggccatcatggaagctgtagtgccttcccgctctaatcccactcatgagaaggtcctggccatcgtgaacgcgttggtggagaacaaagctattcgtccagatgaggccggactggtatacaacgctctcttagaacgcgtggctcgctacaacagtagcaatgtgcaaaccaatttggaccgtatgataacagatgtacgcgaagccgtgtctcagcgcgaaaggttccagcgcgatgccaacctgggttcgctggtggcgttaaatgctttcttgagtactcagcctgctaatgtgccgcgtggtcaacaggattatactaactttttaagtgctttgagactgatggtatcagaagtacctcagagcgaagtatatcagtccggtcctgattacttctttcagactagcagacagggcttgcagacggtaaatctgagccaagcttttaaaaaccttaaaggtttgtggggagtgcatgccccggtaggagaaagagcaaccgtgtctagcttgttaactccgaactcccgcctattattactgttggtagctcctttcaccgacagcggtagcatcgaccgtaattcctatttgggttacctactaaacctgtatcgcgaagccatagggcaaagtcaggtggacgagcagacctatcaagaaattacccaagtcagtcgcgctttgggacaggaagacactggcagtttggaagccactctgaacttcttgcttaccaatcggtctcaaaagatccctcctcaatatgctcttactgcggaggaggagaggatccttagatatgtgcagcagagcgtgggattgtttctgatgcaagagggggcaactccgactgcagcactggacatgacagcgcgaaatatggagcccagcatgtatgccagtaaccgacctttcattaacaaactgctggactacttgcacagagctgccgctatgaactctgattatttcaccaatgccatcttaaacccgcactggctgcccccacctggtttctacacgggcgaatatgacatgcccgaccctaatgacggatttctgtgggacgacgtggacagcgatgttttttcacctctttctgatcatcgcacgtggaaaaaggaaggcggcgatagaatgcattcttctgcatcgctgtccggggtcattggtgctaccgcggctgagcccgagtctgcaagtccttttcctagtctacccttttctctacacagtgtacgtagcagcgaagtgggtagaataagtcgcccgagtttaatgggcgaagaggagtacctaaacgattccttgctcagaccggcaagagaaaaaaatttcccaaacaatggaatagaaagtttggtggataaaatgagtagatggaagacttatgctcaggatcacagagacgagcctgggatcatggggactacaagtagagcgagccgtagacgccagcgccatgacagacagaggggtcttgtgtgggacgatgaggattcggccgatgatagcagcgtattggacttgggtgggagaggaaggggcaacccgtttgctcatttgcgccctcgcttgggtggtatgttgtaa

SEQ ID NO: 665 - DNA, 1161 bp, Adenovirus B34
  MISC_FEATURE (1)..(665): B34.orf00042 L1 43 kDa protein
atgcatcccgtgctgcgacagatgcgtccccaacaacagcccccctcgcagcagcagcaaccacaaaaggctgtccctgcaactactgcaactgccgctgtgagcggtgcgggacagcccgcctatgatctggacttggaagagggcgaaggactggcacgtctaggtgcgccttcgcccgagcggcatccgcgagttcaactgaaaaaagattctcgcgaggcgtatgtgccccaacagaacctatttagagacagaagcggcgaggagccggaggagatgcgagcttcccgctttaacgcgggtcgtgagctgcgtcacggtttggacagaagacgagtgttgcgggacgaggatttcgaagttgatgaagtgacagggatcagtcctgccagggcacacgtggctgcagccaaccttgtatcggcttacgaacagacagtaaaggaagagcgtaatttccaaaagtcttttaataatcatgtgcgaaccctcattgcccgcgaagaagtcacccttggtttgatgcatttgtgggatttgatggaagctatcattcagaaccctactagcaaacctctgaccgcacagctgtttctggtggtgcaacacagcagagacaatgaggctttcagagaggcgctgctcaacatcaccgaacccgaggggagatggttgtatgatcttatcaacattctacagagtatcatagtgcaggagcggagcctgggcctggccgagaaggtggctgccatcaattactcggttttgagcttgggaaagtattacgctcgcaagatctacaagactccatacgttcccatagacaaggaggtgaagatagatgggttctacatgcgcatgacgctgaaggtgttgaccctgagcgatgatcttggggtgtaccgcaatgacagaatgcatcgcgcggtgagcgccagcaggaggcgcgagttaagcgacagggaactgatgcacagtttgcaaagagctctaactggagctggaaccgagggtgagaattactttgatatgggagctgacttgcagtggcagcctagtcgcagggctctgaacgccgcgacggcaggatgtgagcttccttacatagaagaggcggatgaaggcgaggaggaagagggcgagtacttggaagactga

SEQ ID NO: 666 - DNA, 1917 bp, Adenovirus B34
  MISC_FEATURE (1)..(1917): B34.orf00045 E2B terminal protein
atgaactacttcatgccgctacgcaacatttggaaccgcgtacgcgagtttcctcgggcttctactaccgccgcaggaatcacctggatgtccaggtacatctacggctatcaccgccttatgttggaagacctcgcccccggcgctccagctacagaacgatggcctctctaccgccaaccaccgccgcattttcttataggttaccagtatctggtgcgcacctgcaacgattacatctttgacacccgcgcctattcgcgccttaaatacaccgagctcgtgcgccctggtcaccagacagttaactggtcagtcatggccaactgtgcttacaccattaataccggggcttaccaccgctttgtggattttgatgactttcaagccaccctcacccaagtacagcaagccatcctcgccgaaagagtcgtagctgacttggcactggtacaaccaatgcgcgggtttggactcacacgtatgcatggcagaacgggtgaggaagaagtgcccgtagaacggctcatgcaagactactacaaagatcttgctagatgtcaggataatgcttggggaatggccaatcgcctgcgtatccagcaagccggacccaaagacctggtgctcctcgccaccatccgccgtcttagaactgcctactttaatttcatcaccagcagcatcgtctcaccttcccgagatgaagaagaaacagaagacccagaccgaacacataaccacccccgcccacaagaagccgtactcagcctaccttgtgactgtgactggttagacgctttcgtcgaaaggttttcagatcccgtggatcttgacacgatcagatctctgcgcgcagtccctacgggccaattaataaaatgtataatcagcgccctctccctcccaaacggagaacctcccagtcaccactttaaggagatgcgcggcggtgtttttactctgcgaccgcgcgagaacggccgcgccgtcactgaaaccatgcgccgccgccgcggagaggtcattgaacgattcatcgaccgtttgcccgtgcgccgtcgacgtcgccgtgtgccccctccgcccccgcctgaagacgaagaagagatgttagtggaagaagagatagaagaggaagaagagatcccgggagccttcgaacgcgaagtacgggccaccatagccgaactcatccgtcttctcgaggaggaattgaccgtgtccgcgcgaaactcccagttttttaattttgccgtggacttctacgaggccatggagcgcttggaagctctgggcgatgtcagcgaaatgccgctgagacgatggatcatgtatttcttcgtcgccgaacacattgccaccacactcaactacctttttcagcgcctatgcaactatgcggtcttcaccagacacgtggagcttaacctcgctcaggtggtgatgcgcgcaagagactccgagggggccgtggtttacagccgcgtctggaacgaggcgggcatgactgcattctcccaactcatgggccgtatctccaatgacctcgcggccaccgtcgagagagcgggtcgcggagatcttcaggaggaagaaatcgagcagttcatggcggagatcgcctaccaggacaactctggtgacgtacaagaaatactgagacaagctgccgttaacgataccgaaattgattctgttgaactctctttcaggttcaagctcacggggccggtagctttcacccagagacgtcagatacaagacgtcaatcgacgcgtggtggcgcacgcaagtcttctcagagcgcagtaccagaacctgcccgtgcgcggcgccgacgtgccactaccagccatgcctccgggtccggaacaaccgcttccgcccggcgcgcgtccccgtcatcgcttctga

SEQ ID NO: 667 - DNA, 3369 bp, Adenovirus B34
  MISC_FEATURE (1)..(3369): B34.orf00046 E2B DNA polymerase
atgcaagaagcaagagagccaccaccgatcaaaagaaaaaacaaaggtacggtagtggcgcccaaaggacacggaaccctgcaagccattgacatctctacaaacgaacctgtggaaatcaagtaccatctgaacctcccgcacgccctggaaaagatcatgcaagttaatcttctgtccctacctactaacctgagtccgcagcgtctcaggactctggacagctccagcctgcgcgctctggtccttcagctccgcccctcccgcgccgaggtctggacttgcctcccgcgggggctcgtcagcatgaccaccaccgaaacagaagatgaacaggccgatacagcgaatatagaagagcacgagatacaatcgccaggcctcggcttcccactgaaatttctcgtcaagggaagccaggtacagctcattcacgagatacaacccgtgcaacgctgcgactactgcggccgtctgtacaagcacaaacacgaatgctcggcgcgccgcagaaacttctacttccatcacatcaacagccaatcctccaactggtggcaggaaatccagttcttcccgatcggctctcatcctcgcacagaaagactcttcctgacctacgatgtggaaacttacacctggatggggtcctttggcaaacaactagttcctttcatgctggtcatgaaactctcaggagaagagcgtctcgtcaacatggcccacgatctagccattaaactaaagtgggatcgatggcaacaagaccccagaaccttctactgtgtcactccagaaaaaatggcaattggccagcattttcgtcagtatcgggaccagttacaaacagcactggcggtggatctttggtcatcattcctacatgcaaatcctcacctgcacgaatgggctctcgaacactacgccttatctgaccctacagacctaacctttgatgagctcaataagctacctcacgtcaaaggcacgccgcgtttcatagaattatacatcgtaggacacaacatcaacggtttcgacgagatcgtcctagctgcccaggtgatcaacaatcgagcggaagtaccacagcctttccgcatcactcgcaattttatgcccagagccggtaagattctcttcaacgatgttactttcgctttgcccaaccccgcctacaagaaacgggtagacttccaactctgggaacagggagcctgtgacgacatggacttcaaataccaatttctcaaagtcatggtcagagacaccttcgcccttactcacgcttcgctgcgaaaagctgctcaagcatactctctacccgtagagaagggctgctgcccttacaaggcagttaatcagttctacatgctaggatcttaccgtgcagacaaagacgggtttccgctagaagagtactggaaggatcgcgaagaataccttctcaaccgcgaactgtgggaaaagaaaaaccaaccaggttatgacatcattcaagaaacacttgactactgcgccctagacgtacttgtcaccgccgaactggtaaccaagcttcaagaatcttatgcccactttgtcagagactctgtaggtctacctcatgcccatttcaacatttttcaaagacccaccatctcttccaattctcacgccatctttcgccagattgtctacagaacagaaaaacccaatcgcaccaacttgggtccggggttgctagcgccatcacatgaactatatgactatgtgcgagcaagtatcagaggggggcgatgctatccaacctatataggcatctttgaggatcccatctacgtctatgacatctgtggcatgtatgcctctgcactcacccatcccatgccctggggcagtccccttaacccatatgagcgtgcactggcagctcgagaatggcaaatggccttagatgaccccactcccatcagctattttgataaggatttacttccgggaatctttaccatggatgcagaccctcccgatgaacttatgctagacccacttccccctttctgttctaggaaaggaggtaggctctgttggaccaacgaaccccttcgaggcgaggtggccaccagtgtggatttaattaccttgcataatcgagggtggcaagtgagaatcgtgccagatgaattgacaactatcttccccgaatggaagtgcctagcacgcgagtatgtccaactcaacatcgctgccaaagagcgcgcggacaaggaaaagaaccaaaccatgcgatccattgccaaacttttatccaacgccctgtatggatcatttgccaccaaacttgacaataaaaaaattgtgttttctgaccaaatggacgaaaacctcatgaaaggcatctcaaccggcactgtcaatatcaaatcctcctcgttcttagaaactgacaacctgagtgcagaggtcatgcccgccttcgagagggaatacctaccccaacagctgacgttcctggacagcgatccggaagacagtgaggaagagcaaagaaccgcccccttttatacccccccagcggggaccccaggtcacgtgaaatacacctacaagccaatcacattcctggatgttgaagagggtgacatgtgtttgcatactttggaaaaggtggaccccctggttgacaacgatcgctacccctcccacatagcctcctttgtgctggcctggacgcgcgcctttgtatcagagtggtcagagttcctgtacgaagaagaccgaggcactccactggagaagaggcctgtaaaatcagtctacggggatacggacagcctgtttgtcactcaacgaggacacgaactcatggagaccaaaggtaagaaacgcatcaaaaaatatggcggaaaacttgtttttgaccccaatgaaccggatttaacctggctggtggaatgtgaaactgtttgcgcctcctgcggcgcagatgcatactccccagaatccattttccttgcgcccaagctgtatgcgctgaaatgcctatactgcccggtatgcaagaaaacttccaaaggtaagctccgcgccaaaggccacgcagccgaggcgctcaactacgaactcatggtaaactgctacttggccgacatacagggcgccaagcgacagaagttctccaccagcagaatgagtctgaagcgcaccctggcaagcgcccaagcaggcgcacaccccttcactgtgacggaaacaaccctgactcgaacactgagaccctggaaggaccgaaccctggcagcgctggacgcccatcgtctcataccctactccaggagccgtccaaacccgcgaaacgaggaggtctgctggatcgagatgccatag

SEQ ID NO: 668 - DNA, 1047 bp, Adenovirus B34
  MISC_FEATURE (1)..(1047): B34.orf00047 E2B protein IVa2
atgcccatggctgacggtctaaaaccgctgaaaaacttttcctcactacaagaacttctatcactaggaggagagcgcctcctaatggatttggtgcgggaaaatatgcatgtaagggaaatgatgaacgaggtggcccccttgcttcgagaagacggcagttgccgttccctaaactaccacctgcaacctgtaatcggaatcatttatggccccaccggatgtggcaaatctcaattgctcagaaacttgctatcatcccaactaatcacccccgccccagaaacggtgttcttcatagccccccaggtggacatgattccaccatcggaactgaaagcttgggaaatgcaaatctgtgaggggaactatgctccggggcccgaaggaacattcataccccaatcgggtactctccgccccaaattcattaaaatggcttatgatgatttaactcaggaacataactatgatgtgtcagacccacggaacgtgtttgcccgcgctgctgcccacggccccattgctattatcatggatgagtgcatggaaaatctcggaggacacaagggtgtctccaaatttttccacgcttttccatccaagctacacgataaatttcctaaatgtaccggatacaccgtcttggtggtccttcataacatgaacccaagacgagatcttggcggcaatattgccaacttaaaaatccaatccaaaatgcacataatttcaccccgaatgcacccctcccagctcaaccggtttgtaaacacctacaccaagggcttatctgtggcaatcagcctacttctaaaagatattgtgcaacaccatgcactgcgaccttgttatgactgggtgatttacaacactaccccggagcatgaatcccttcaatggagctatctccaccccaaagatggcctaatgcccatgtatctaaacattcaatcccacctctataggattctggaaaaaatccaccgtgttctcaatgatcgagatcggtggtctagggcataccgtgcgcgaaaaatgaaataa

SEQ ID NO: 669 - DNA, 330 bp, Adenovirus B34
  MISC_FEATURE (1)..(330): B34.orf00049 IX hexon associated protein IX
atgggatctactgtggatggaagacccgtccaacccgccaattcttcaacgctgacctatgctactttaagttcttcacctttggacgcagctgcagccgccgccgccgcctctgttgccgctaacactgtgcttggaatgggttactatggaagtatcgtggctaattccacttcctctaataacccttctaccctgactcaggacaagttacttgtccttttggcccagctggaggctttgacccaacgtctgggtgaactttatcagcaggtggccgagttgcgagtacaaactgagtctgctgtcggcacggcaaagtctaaataa

SEQ ID NO: 670 - DNA, 1122 bp, Adenovirus B34
  MISC_FEATURE (1)..(1122): B34.orf00055 E1B 54.9 kDa protein
atgagtcgcagacgtcctgaaaccatttggtggcatgaggtccagaaagagggaagggatgaagtttctgtattgcaggagaaatattcactggaacaggtgaaaacatgttggttggagcctgaggatgattgggaggtggccattaaaaattatgccaagatagctttgaggcctgataaacagtataagattactagacggattaatatccggaatgcttgttacatatctggaaatggggctgaggtggtaatagatactcaagacaaggcagttattagatgctgcatgatggatatgtggcctggagtagtcggtatggaagcagtaacttttgtaaatgttaagtttaggggagatggttataatggaatagtgtttatggccaataccaaacttatattgcatggttgtagcttttttggtttcaacaatacctgtgtagatgcctggggacaggttagtgtacggggatgtagtttctatgcgtgttggattgccacagctggcagaaccaagagtcaattgtctctgaagaaatgcatattccaaagatgtaacctgggcattctgaatgaaggcgaagcaagggtccgccactgcgcttctacagatactggatgttttattttaattaagggcaatgccagcgtaaagcataacatgatttgcggtgcttccgatgagaggccttatcaaatgctcacttgtgccggtgggcattgtaatatgctggctactgtgcatattgtttcccatcaacgcaaaaaatggcctgtttttgatcacaatgtgttgaccaagtgtaccatgcatgcaggtgggcgtagaggaatgtttatgccttaccagtgtaacatgaatcatgtgaaagtgttgttggaaccagatgccttttccagaatgagcctaacaggaatctttgacatgaacatgcaaatctggaagatcctgaggtatgatgatacgagatcgagggtgcgcgcatgcgaatgcggaggcaagcatgccaggttccagccggtgtgtgtagatgtgactgaagatctgagaccggatcatttggttattgcccgcactggagcagagttcggatccagtggagaagaaactgactaa

SEQ ID NO: 671 - DNA, 543 bp, Adenovirus B34
  MISC_FEATURE (1)..(543): B34.orf00056 E1B 20 kDa protein
atggaggtttgggccattttggaagaccttagaaagactaggcaactgttagaggacgcttcggacggagtctccggtttttggagattctggttcgctagtgaattagctagggtagtttttaggataaaacaggactataaagaagaatttgaaaagttgttggtagattgcccaggactttttgaagctcttaatttgggccatcaagttcactttaaagaaaaagttttatcagttttagacttttcaaccccaggtagaactgccgctgctgtggcttttcttacttttatattagataaatggatcccgcagactcatttcagcaggggatacgttttggatttcgtagccacagcattgtggagaacatggaaggttcgcaagatgaggacaatcttaggttactggccagtgcagcctttgggtgtagcgggaatcctgaggcatccaccggtcatgccagcggttctggaggaggaacagcaagaggacaacccgagagccggcctggaccctccagtggaggaggcggagtag

SEQ ID NO: 672 - DNA, 261 bp, Adenovirus B34
  MISC_FEATURE (1)..(261): B34.orf00057 E1A 231 R
atgctgtttttcacatgtatattgagtgggagttttgtgcttcttattataggtcctgtgtctgatgctgatgagtcaccatctcctgattctactacctcacctcctgagattcaagcacctgttcctgtggacgtgcgcaagcccattcctgtgaagcttaagcctgggaaacgtccagcagtggaaaaacttgaggacttgttacagggtggggacggacctttggacttgagtacacggaaacggccaagacaataa

SEQ ID NO: 673 - DNA, 840 bp, Adenovirus B34
  MISC_FEATURE (1)..(840): B34.orf00058 E1A 29.1 kDa protein
atgtggtatttatggcagggtggagtatttgttcagggccaggtagactttgacccattacgtggaggtttcgattaccgtgttttttacctgaatttccgcgtaccgtgtcaaagtcttctgtttttacgtaggtgtcagctgatcgctacggtatttatacctcagggtttgtgtcaagaggccactcttgagtgccagcgagaagagttttctcctctgcgccggcagtttaataataaaaaaatgagagatttgcgatttctgcctcaggaaataatttctgctgagactggaaatgaaatactggagcttgtggtgcacgccctgatgggagacgatccggagccacctgtgcagctttttgagcctcctacgcttcaggaactgtatgatttagaggtagagggatcggaggattctaatgaggaagctgtgaatggcttttttaccgattctatgcttttagctgctaatgaaggattagaattagatccgcctttggacactttcgatactccaggggtgattgtggaaagcggtacaggtgtaagaaaattacctgatttgggttccgtggactgtgatttgcactgctatgaagacgggtttcctccgagtgatgaggaggaccatgaaaaggagcagtctatgcagactgcagcgggtgagggagtgaaggctgccagtgttggttttcagttggattgcccggagcttcctggacatggctgtaagtcttgtgaatttcacaggaaaaatactggagtaaaggaactgttatgttcgctttgttatatgagagcgcactgccactttatttacagtaagtgtgtttaa

SEQ ID NO: 674 - DNA, 129 bp, Artificial Sequence
  B34.orf00060 hypothetical protein
atgcgtcacatttcccgcgacaacttgcaaaaaaactccacccccacaaaacgtcattttcccacggccgcgccgccccgtttagccgttaaccccacagccaatcaccacacaccccacaatttttaa

SEQ ID NO: 675 - DNA, 126 bp, Artificial Sequence
  B35.orf00001 hypothetical protein
atgctcgagcggccgccagtgtgctggaattcgcccttgtttaaacgcgatcgctgcaggttaattaaggaagggcgaattctgcagatatccatcacactggcggccgctcgagcatgcatctag

SEQ ID NO: 676 - DNA, 378 bp, Adenovirus B35
  MISC_FEATURE (1)..(378): B35.orf00002 E4 ORF1 protein
atggctgatgaggctttgtatgtgtatttagagggaccgggggcgacgttgcctaaacagcagcagagaaataattatattttttattctcctgtgccttttactttgtatccgcgaggggtggctttgctatacttacgattaagcataattatacccaaaggctatgttggctgttttttctccttaactgatgctaacatgtctggattgtatgcttcatcaagacttattcatgctggtcaccgcgaggaactttcggtgctgttgtttaatcacgatgacaggttttacgagggtcgagctggagaccctgtggcttgtcttgtgatggaaagactgatttatccacctgttcgtcaggctactatgatatga

SEQ ID NO: 677 - DNA, 437 bp, Adenovirus B35
  MISC_FEATURE (1)..(437): B35.orf00003 E4 ORF2 protein
atgacgcttgttttttttttatttttgcagactaattcaaaactaacaatgttggagcgcagcgcggtaacctattgcatttgcatcccagaggttttgaatgtttttttggcaaatttttcttttattcaatttctacaagaaactctgcctgattatatttccagcaacttcgatgatattactggtggttcccaatatgcttattccaatcttgtttttgctggagccaattggggaggtctgcgcttgtactgcactgtagcgtcccctgctcttgttcccggggggcttctggctaagcagtttggtgataatatgagagagtttttacaactagaacttaaagaagaacttagagccaagggcatgtcaattgatgttgccattctcaattcgctacaggtgacacaggagcaagatattttgtcattatg

SEQ ID NO: 678 - DNA, 354 bp, Adenovirus B35; identical to SEQ ID NO: 641
  MISC_FEATURE (1)..(354): B35.orf00004 E4 ORF3 protein

SEQ ID NO: 679 - DNA, 900 bp, Adenovirus B35
  MISC_FEATURE (1)..(900): B35.orf00007 E4 ORF6 protein
atgtcaggaagcaactccattatgacaaggttgcgcgcacgctcgacatcatgcgccagacatcacccttacaccagagcccagttaccacgttgtgaggaaaatgaaacccgagcttctatgactgaagaccacccgctgttgccagattgtgatactatgactatgcatagtgtaagttgtgttcgtggtcttccttgttctgccagctttactgttctgcaagagcttcctattccctgggatatgtttctaaatcctgaggagttaaaaattatgagaagatgcatgcatttatgtctatgttgtgccactatagatatttttcattctcaagtgattcacggtcgagagaattgggttcttcattgtcattgtaatcagcagggttcacttcaatgcatggctgggggagcggtgttggcagtgtggttccggaaggttatattgggttgcatgattaaccaacgttgtccatggtacagacagattgttaatatgcacatgccaaaagagatcatgtatgtgggtagtgtgtttttgagggaacgtcatttaatttatattaaactttggtatgatggtcatgcaggggcgattatatcagatatgagttttggctggagcgcttttaattatggtttattaaacaatattgtaataatgtgttgtacctactgcaaagatttgagtgaaatcagaatgcgttgctgcgcgcatcgcaccagaaagttgatgttaagggctattaaaatcatgcttcaggaaactgtggaccctgatcccataaacagcagtcgcacggagcgacgcagacagcggctgcttgtgggtttgatgagacacaatcgtccgataccgttttcggattatgattcccatcgttcttcttccagatga

SEQ ID NO: 680 - DNA, 252 bp, Adenovirus B35
  MISC_FEATURE (1)..(252): B35.orf00008 E4 ORF6/7 protein
atgaccgtgatccaaactccggagtcgcatccgcagcagttggactgtgaaagcgctttaaaagactatcgcgatggatttttatctatcactgaccccagattggctcgctctgaaactgtttggaatgtggaatctaaaacaatgtctatctctaatggtatccaaatgtttaaagctgtgcgtggggagagattggtgtattctgtcaaatgggaaggtggaggcaaaataactactcgaattttgtga

SEQ ID NO: 681 - DNA, 972 bp, Adenovirus B35; identical to SEQ ID NO: 141
  MISC_FEATURE (1)..(972): B35.orf00009 L5 fiber

SEQ ID NO: 682 - DNA, 165 bp, Adenovirus B35; identical to SEQ ID NO: 532
  MISC_FEATURE (1)..(165): B35.orf00010 U protein

SEQ ID NO: 683 - DNA, 408 bp, Adenovirus B35
  MISC_FEATURE (1)..(408): B35.orf00012 E3B 15.3K protein
atgactgaaacactcaccacctccaattccgccgaggatctgctcgatatggacggccgcgtctcagaacaacgacttgcccaactacgcatccgccagcagcaggaacgcgtggccaaagagctcagagatgtcatccaaattcaccaatgcaaaaaaggcatattctgtttggtaaaacaagccaagatatcctacgagatcaccgctactgaccatcgcctctcttacgaacttggcccccaacgacaaaaatttacctgcatggtgggaatcaaccccatagttatcacccaacaaagtggagatactaagggttgcattcactgctcctgcgattccatcgagtgcacctacaccctgctgaagaccctatgcggcctaagagacctgctaccaatgaattaa

SEQ ID NO: 684 - DNA, 405 bp, Adenovirus B35
  MISC_FEATURE (1)..(405): B35.orf00013 E3B 15.2K protein
atgcaggctatactaccaatatttttgcttctattgcttccctacgctgtctcaaccccagctgcctatagtactccaccagaacaccttagaaaatgcaaattccaacaaccgtggtcatttcttgcttgctatcgagaaaaatcagaaatccccccaaatttaataatgattgctggaataattaatataatctgttgcaccataatttcatttttgatataccccctatttgattttggctggaatgctcccaatgcacatgatcatccacaagacccagaggaacacattcccccacaaaacatgcaacatccaatagcgctaatagattacgaaagtgaaccacaacccccactactccctgctattagttacttcaacctaaccggcggagatgactga

SEQ ID NO: 685 - DNA, 276 bp, Adenovirus B35
  MISC_FEATURE (1)..(276): B35.orf00014 E3B 10.3K protein
atggtacctagaaatttcttcttcaccatactcatctgtgcttttaatgtttgcgctactttcacagcagtagccacagcaaccccagactgtataggagcatttgcttcctatgcactttttgcttttgttacttgcatctgcgtatgtagcatagtctgcctggttattaattttttccaacttctagactggatccttgtgcgaattgcctacctgcgccaccatcccgaataccgcaaccaaaatatcgcggcacttcttagactcatctaa

SEQ ID NO: 686 - DNA, 564 bp, Adenovirus B35
  MISC_FEATURE (1)..(564): B35.orf00017 E3A 20.6K protein
atggtttccactaccacattccttatgcttactagtctcgcaactctgacttctgctcgctcacacctcactgtaactataggctcaaactgcacactaaaaggacctcaaggtggtcatgtcttttggtggagaatatatgacaatggatggtttacaaaaccatgtgaccaacctggtagatttttctgcaacggcagagacctaaccattatcaacgtgacagcaaatgacaaaggcttctattatggaaccgactataaaagtagtttagattataacattattgtactgccatctaccactccagcaccccgcacaactactttctctagcagcagtgtcgctaacaatacaatttccaatccaacctttgccgcgcttttaaaacgcactgtgaataattctacaacttcacatacaacaatttccacttcaacaatcagcatcatcgctgcagtgacaattggaatatctattcttgtttttaccataacctactacgcctgctgctatagaaaagacaaacataaaggtgatccattacttagatttgatatttaa

SEQ ID NO: 687 - DNA, 546 bp, Adenovirus B35
  MISC_FEATURE (1)..(456): B35.orf00018 E3A 20.3K protein
atggcttctcttacatctctcatatttgtcagcattgtcactgccgctcacggacaaacagtcgtctctatcccactaggacataattacactctcataggacccccaatcacttcagaggtcatctggaccaaactgggaagcgttgattactttgatataatctgtaacaaaacaaaaccaataatagtaacttgcaacatacaaaatcttacattgattaatgttagcaaagtttacagcggttactattatggttatgacagatacagtagtcaatatagaaattacttggttcgtgttacccagttgaaaaccacgaaaatgccaaatatggcaaagattcgatccgatgacaattctctagaaacttttacatctcccaccacacccgacgaaaaaaacatcccagattcaatgattgcaattgttgcagcggtggcagtggtgatggcactaataataatatgcatgcttttatatgcttgtcgctacaaaaagtttcatcctaaaaaacaagatctcctactaaggcttaacatttaa

SEQ ID NO: 688 - DNA, 501 bp, Adenovirus B35
  MISC_FEATURE (1)..(501): B35.orf00020 E3A 18.5K protein
atggggcccatactagtcttgcttgttttactttcgcttttggaaccgggttctgccaattacgatccatgtctagactttgacccagaaaactgcacacttacttttgcacccgacacaagccgcatctgtggagttcttattaagtgcggatgggaatgcaggtccgttgaaattacacacaataacaaaacctggaacaataccttatccaccacatgggagccaggagttcccgagtggtacactgtctctgtccgaggtcctgacggttccatccgcattagtaacaacactttcattttttctgaaatgtgcgatctggccatgttcatgagcaaacagtattctctatggcctcctagcaaggacaacatcgtaacgttctccattgcttattgcttgtgcgcttgccttcttactgctttactgtgcgtatgcatacacctgcttgtaaccactcgcatcaaaaacgccaataacaaagaaaaaatgccttaa

SEQ ID NO: 689 - DNA, 396 bp, Adenovirus B35
  MISC_FEATURE (1)..(396): B35.orf00022 E3A 16.1K protein
atgaaagcctttgctgtcttatgtgtactgagtttaataaaaactgaattaagactctcctacggactgccgcttcttcaacccggattttacaaccagaagaacaaaacttttcctgtcgtccaggactctgttaacttcacctttcctactcacaaactagaagctcaacgactacaccgcttttccagaagcattttccctactaatactactttcaaaaccggaggtgagctccacggtctccctacagaaaacccttgggtggaagcgggccttgtagtactaggaattcttgcgggtgggcttgtgattattctttgctacctatacacaccttgcttcactttcctagtggtgttgtggtattggtttaaaaaatggggcccatactag

SEQ ID NO: 690 - DNA, 318 bp, Adenovirus B35
  MISC_FEATURE (1)..(318): B35.orf00023 E3A 12.1K protein
atgtctggtgacgcggctgagctatctcggctgcgacatctagaccactgccgccgctttcgctgctttgcccgggaacttattgagttcatctacttcgaactccccaaggatcaccctcaaggtccggcccacggagtgcggattactatcgaaggcaaaatagactctcgcctgcaacgaattttctcccagcggcccgtgctgatcgagcgagaccagggaaacaccacggtttccatctactgcatttgtaatcaccccggattgcatgaaagcctttgctgtcttatgtgtactgagtttaataaaaactga

SEQ ID NO: 691 - DNA, 684 bp, Adenovirus B35
  MISC_FEATURE (1)..(684): B35.orf00024 L4 protein VIII hexon associated protein
atgagtaaagaaattcccacgccttacatgtggagttatcaaccccaaatgggattggcagcaggcgcctcccaggactactccacccgcatgaattggctcagcgccgggccttctatgatttctcgagttaatgatatacgcgcctaccgaaaccaaatacttttggaacagtcagctcttaccaccacgccccgccaacaccttaatcccagaaattggcccgccgccctagtgtaccaggaaagtcccgctcccaccactgtattacttcctcgagacgcccaggccgaagtccaaatgactaatgcaggtgcgcagttagctggcggctccaccctatgtcgtcacaggcctcggcataatataaaacgcctgatgatcagaggccgaggtatccagctcaacgacgagtcggtgagctctccgcttggtctacgaccagacggaatctttcagattgccggctgcgggagatcttccttcacccctcgtcaggctgttctgactttggaaagttcgtcttcgcaaccccgctcgggcggaatcgggaccgttcaatttgtagaggagtttactccctctgtctacttcaaccccttctccggatctcctgggcactacccggacgagttcataccgaacttcgacgcgattagcgagtcagtggacggctacgattga

SEQ ID NO: 692 - DNA, 255 bp, Adenovirus B35
  MISC_FEATURE (1)..(255): B35.orf00026 L4 33K protein
atggcatacagggttggaaagatccgatttcttaactctcgggtttgcgctggctcgttggctgtaatctttaatcctcctgttgctgcacttgttgtgtattttctaactgccgctgctggttttctgttggaggtcgccgccgctgtctttatctgtcgagactgtcgggatttgctggctatagtaggggctgtggaggtgacggtagtaatgcaaaacattgcgcggaaagttcaccccatggtggaatag

SEQ ID NO: 693 - DNA, 2439 bp, Adenovirus B35
  MISC_FEATURE (1)..(2439): B35.orf00028 L4 100K protein
atggaaactcagccattgctgtcaacatcgccacgagtgccatcacatctcgtcctcagcgacgaggaaaaggagcagagcttaagcattccaccgcccagtcctgccaccacctctaccctagaagataaggaggtcgacgcatctcatgacatgcagaataaaaaagcgaaagagtctgagacagacatcgagcaagacccgggctatgtgacaccggtggaacacgaggaagagttgaaacgctttctagagagagaggatgaaaactgcccaaaacagcgagcagataactatcaccaagatgctggaaatagggatcagaacaccgactacctcatagggcttgacggggaagacgcgctccttaaacatctagcaagacagtcgctcatagtcaaggatgcattattggacagaactgaagtgcccatcagtgtggaagagctcagctgcgcctacgagcttaaccttttttcacctcgtactccccccaaacgtcagccaaacggcacctgcgagccaaatcctcgcttaaacttttatccagcttttgctgtgccagaagtactggctacctatcacatcttttttaaaaatcaaaaaattccagtctcctgccgcgctaatcgcacccgcgccgatgccctactcaatctgggacctggttcacgcttacctgatatagcttccttggaagaggttccaaagatcttcgagggtctgggcaataatgagactcgggccgcaaatgctctgcaaaagggagaaaatggcatggatgagcatcacagcgttctggtggaattggaaggcgataatgccagactcgcagtactcaagcgaagcgtcgaggtcacacacttcgcatatcccgctgtcaacctgccccctaaagtcatgacggcggtcatggaccagttactcattaagcgcgcaagtcccctttcagaagacatgcatgacccagatgcctgtgatgagggtaaaccagtggtcagtgatgagcagctaacccgatggctgggcaccgactctccccgggatttggaagagcgtcgcaagcttatgatggccgtggtgctggttaccgtagaactagagtgtctccgacgtttctttaccgattcagaaaccttgcgcaaactcgaagagaatctgcactacacttttagacacggctttgtgcggcaggcatgcaagatatctaacgtggaactcaccaacctggtttcctacatgggtattctgcatgagaatcgcctaggacaaagcgtgctgcacagcacccttaagggggaagcccgccgtgattacatccgcgattgtgtctatctctacctgtgccacacgtggcaaaccggcatgggtgtatggcagcaatgtttagaagaacagaacttgaaagagcttgacaagctcttacagaaatctcttaaggttctgtggacagggttcgacgagcgcaccgtcgcttccgacctggcagacctcatcttcccagagcgtctcagggttactttgcgaaacggattgcctgactttatgagccagagcatgcttaacaattttcgctctttcatcctggaacgctccggtatcctgcccgccacctgctgcgcactgccctccgactttgtgcctctcacctaccgcgagtgccccccgccgctatggagtcactgctacctgttccgtctggccaactatctctcctaccactcggatgtgatcgaggatgtgagcggagacggcttgctggagtgccactgccgctgcaatctgtgcacgccccaccggtccctagcttgcaacccccagttgatgagcgaaacccagataataggcacctttgaattgcaaggccccagcagccaaggcgatgggtcttctcctgggcaaagtttaaaactgaccccgggactgtggacctccgcctacttgcgcaagtttgctccggaagattaccacccctatgaaatcaagttctatgaggaccaatcacagcctccaaaggccgaactttcggcttgcgtcatcacccagggggcaattctggcccaattgcaagccatccaaaaatcccgccaagaatttctactgaaaaagggtaagggggtctaccttgacccccagaccggcgaggaactcaacacaaggttccctcaggatgtcccaacgacgagaaaacaagaagttgaaggtgcagccgccgcccccagaagatatggaggaagattgggacagtcaggcagaggaggcggaggaggacagtctggaggacagtctggaggaagacagtttggaggaggaaaacgaggaggcagaggaggtggaagaagtaaccgccgacaaacagttatcctcggctgcggagacaagcaacagcgctaccatctccgctccgagtcgaggaacccggcggcgtcccagcagtag

SEQ ID NO: 694 - DNA, 1557 bp, Adenovirus B35
  MISC_FEATURE (1)..(1557): B35.orf00029 E2A DNA binding protein
atggccagccgcgaaggaaatcagttaagcgaccgccacagggagcacacccccgaacgcggaaggggttctgccagtcatccgccttccaggtcggaccgcagcccttcgcaatcgcctccacctctgcccccgaagaaaaacacctgtcgccgtgtggggtcaggttcttctaccgacagtcagttggtaatggtgagcgaaacgtcacaatcctccctgtctccggaacggagcgacagtcctcctcctccgataccccccaaaaagaagccaaggaagaccaaacatatccccatgcaagacatcagtcaagacagcgaagaagaaagagaagaggcgcaacttgtagcagtgggtttcagctacccgcccgtgcgcatcgttgagaaggatggcaaaagaagcattgagaagatcgctaaagatgaccctctggctaaaggagctgctgcctgcactgttaagaatccgattagcttgcccctggtgtctgcttgggagaaaggcatggaagtgatgtgtctgctgatggagaagtacaggctggataacgaacttagaacctgttttaaactaatgcctgagcaacacgaacaatacaagcgcatctgtcaccagtacgtaaacgaagagcaccgaggcatccagttaactttcactagtcacaagacactgagcacgatgatgggaagatttctgcagggaatgatacattctttttctcagatcgcccaccataattgggaatgtacaggctgtgcgttgtggcctcatggctgcaatgattatgagggcaagctgaagtgcctgcatggcaatattatgattcagaaggagcagattatcgagatggatgtggccagcgagaacggacaacgagccttaaaggagaatcccgagcgaaccaaaatcacccaaaaccgctggggcagaagtgtggtgcaaatagccaacaatgacgcccgctgctgtgtgaatgatgccggctgtgcagctaaccagttttcgagcaggtcctgcgggatgttttataccgagggtagtaaagcccagcaggctttcaagcaatatgatgctttcatgagagccgtgtatccaggaatcagacaggatcaggccaagatgatactgatccccctgcactgcgattgcaaccacaagcctaattgggtgcccgccatgggtaggcagacctgcaagatgaccccgttcagcattgccaatgctgaagatctggatgtgggcatgattgcagatcccaccgtgctggcaagcgtgagacatccgtcgctgatggtgtttcagtgctgcaatccggtgtaccgcaactctcgcgctcagagcactggtcctaattgtgatttcaagatttcggctcctgacctgcttggagctttgcagctgaccagaaagctgtggagtgacatcctgcccgatataccggttcccaagttggtgattcccgaattcaagtggcaacccaagtatcagttccgcaacgtatcactgcctgcgggtcattctgattctcgtcagaacccattcgacttgtaa

SEQ ID NO: 695 - DNA, 630 bp, Adenovirus B35
  MISC_FEATURE (1)..(630): B35.orf00031 L3 23K proteinase
atggcctgcggatcccaaaacggctccagcgagcaagagctcagagccattgtccaagacctgggttgcggaccctattttttgggaacctacgataagcgcttcccggggttcatggcccccgataagctcgcctgtgccattgtaaatacggccggacgtgagacggggggagagcactggttggctttcggttggaacccacgttctaacacctgctacctttttgatccttttggattctcggatgatcgtctcaaacagatttaccagtttgaatatgagggtctcctgcgccgcagcgctcttgctaccaaggaccgctgtattacgctggaaaaatctacccagaccgtgcagggcccccgttctgccgcctgcggacttttctgctgcatgttccttcacgcctttgtgcactggcctgaccgtcccatggacggaaaccccaccatgaaattgctaactggagtgccaaacaacatgcttcattctcctaaagtccagcccaccctgtgtgacaatcaaaaagcactctaccattttcttaatacccattcgccttattttcgctctcatcgtacacacatcgaaagggccactgcgttcgaccgtatggatgttcaataa

SEQ ID NO: 696 - DNA, 2859 bp, Adenovirus B35; identical to SEQ ID NO: 201
  MISC_FEATURE (1)..(2859): B35.orf00033 L3 hexon

SEQ ID NO: 697 - DNA, 741 bp, Adenovirus B35; identical to SEQ ID NO: 547
  MISC_FEATURE (1)..(741): B35.orf00036 L3 protein VI

SEQ ID NO: 698 - DNA, 231 bp, Adenovirus B35; identical to SEQ ID NO: 548
  MISC_FEATURE (1)..(231): B35.orf00037 L2 protein X

SEQ ID NO: 699 - DNA, 1056 bp, Adenovirus B35
  MISC_FEATURE (1)..(1056): B35.orf00038 L2 protein V
atgtccaagcgcaaatacaaggaagaaatgctgcaggttatcgcacctgaagtctacggccaaccgttgaaggatgaaaaaaaaccccgcaaaatcaagcgggttaaaaaggacaaaaaagaagaggaagatggcgatgatgggctggcggagtttgtgcgcgagtttgccccacggcgacgcgtgcaatggcgtgggcgcaaagttcgacatgtgttgagacctggaacttcggtggtctttacacccggcgagcgttcaagcgctacttttaagcgttcctatgatgaggtgtacggggatgatgatattcttgagcaggcggctgaccgattaggcgagtttgcttatggcaagcgtagtagaataacttccaaggatgagacagtgtcaatacccttggatcatggaaatcccacccctagtcttaaaccggtcactttgcagcaagtgttacccgtaactccgcgaacaggtgttaaacgcgaaggtgaagatttgtatcccactatgcaactgatggtacccaaacgccagaagttggaggacgttttggagaaagtaaaagtggatccagatattcaacctgaggttaaagtgagacccattaagcaggtagcgcctggtctgggggtacaaactgtagacattaagattcccactgaaagtatggaagtgcaaactgaacccgcaaagcctactgccacctccactgaagtgcaaacggatccatggatgcccatgcctattacaactgacgccgccggtcccactcgaagatcccgacgaaagtacggtccagcaagtctgttgatgcccaattatgttgtacacccatctattattcctactcctggttaccgaggcactcgctactatcgcagccgaaacagtacctcccgccgtcgccgcaagacacctgcaaatcgcagtcgtcgccgtagacgcacaagcaaaccgactcccggcgccctggtgcggcaagtgtaccgcaatggtagtgcggaacctttgacactgccgcgtgcgcgttaccatccgagtatcatcacttaa

SEQ ID NO: 700 - DNA, 1698 bp, Adenovirus B35; identical to SEQ ID NO: 173
  MISC_FEATURE (1)..(1698): B35.orf00039 L2 penton

SEQ ID NO: 701 - DNA, 1593 bp, Adenovirus B35
  MISC_FEATURE (1)..(1593): B35.orf00042 L1 IIIa protein
atggaagctgtagtgccttcccgatctaatcccactcatgagaaggtcctggccatcgtgaacgcgttggtggagaacaaagctattcgtccagatgaggccggactggtatacaacgctctcttagaacgcgtggctcgctacaacagtagcaatgtgcaaaccaatttggaccgtatgataacagatgtacgcgaagccgtgtctcagcgcgaaaggttccagcgtgatgccaacctgggttcgctggtggcgttaaatgctttcttgagtactcagcctgctaatgtgccgcgtggtcaacaggattatactaactttttaagtgctttgagactgatggtatcagaagtacctcagagcgaagtgtatcagtccggtcctgattacttctttcagactagcagacagggcttgcagacggtaaatctgagccaagcttttaaaaaccttaaaggtttgtggggagtgcatgccccggtaggagaaagagcaaccgtgtctagcttgttaactccgaactcccgcctgttattactgttggtagctcctttcaccgacagcggtagcatcgaccgtaattcctatttgggttacctactaaacctgtatcgcgaagccatagggcaaagtcaggtggacgagcagacctatcaagaaattacccaagtcagtcgcgctttgggacaggaagacactggcagtttggaagccactctgaacttcttgcttaccaatcggtctcaaaagatccctcctcaatatgctcttactgcggaggaggagaggatccttagatatgtgcagcagagcgtgggattgtttctgatgcaagagggggcaactccgactgcagcactggacatgacagcgcgaaatatggagcccagcatgtatgccagtaaccgacctttcattaacaaactgctggactacttgcacagagctgccgctatgaactctgattatttcaccaatgccatcttaaacccgcactggctgcccccacctggtttctacacgggcgaatatgacatgcccgaccctaatgacggatttctgtgggacgacgtggacagcgatgttttttcacctctttctgatcatcgcacgtggaaaaaggaaggcggtgatagaatgcattcttctgcatcgctgtccggggtcatgggtgctaccgcggctgagcccgagtctgcaagtccttttcctagtctacccttttctctacacagtgtacgtagcagcgaagtgggtagaataagtcgcccgagtttaatgggcgaagaggagtacctaaacgattccttgctcagaccggcaagagaaaaaaatttcccaaacaatggaatagaaagtttggtggataaaatgagtagatggaagacttatgctcaggatcacagagacgagcctgggatcatggggactacaagtagagcgagccgtagacgccagcgccatgacagacagaggggtcttgtgtgggacgatgaggattcggccgatgatagcagcgtgttggacttgggtgggagaggaaggggcaacccgtttgctcatttgcgccctcgcttgggtggtatgttgtga

SEQ ID NO: 702 - DNA, 177 bp, Artificial Sequence; identical to SEQ ID NO: 552
  B35.orf00043 E2B 6.1 kDa hypothetical protein

SEQ ID NO: 703 - DNA, 1167 bp, Adenovirus B35
  MISC_FEATURE (1)..(1167): B35.orf00045 L1 55K protein
atgcatcccgtgctgcgacagatgcgcccccaacaacagcccccctcgcagcagcagcagcagcaaccacaaaaggctgtccctgcaactactgcaactgccgccgtgagcggtgcgggacagcccgcctatgatctggacttggaagagggcgaaggactggcacgtctaggtgcgccttcgcccgagcggcatccgcgagttcaactgaaaaaagattctcgcgaggcgtatgtgccccaacagaacctatttagagacagaagcggcgaggagccggaggagatgcgagcttcccgctttaacgcgggtcgtgagctgcgtcacggtttggaccgaagacgagtgttgcgagacgaggatttcgaagttgatgaagtgacagggatcagtcctgccagggcacacgtggctgcagccaaccttgtatcggcttacgagcagacagtaaaggaagagcgtaacttccaaaagtcttttaataatcatgtgcgaaccctgattgcccgcgaagaagttacccttggtttgatgcatttgtgggatttgatggaagctatcattcagaaccctactagcaaacctctgaccgcccagctgtttctggtggtgcaacacagcagagacaatgaggctttcagagaggcgctgctgaacatcaccgaacccgaggggagatggttgtatgatcttatcaacattctacagagtatcatagtgcaggagcggagcctgggcctggccgagaaggtagctgccatcaattactcggttttgagcttgggaaaatattacgctcgcaaaatctacaagactccatacgttcccatagacaaggaggtgaagatagatgggttctacatgcgcatgacgctcaaggtcttgaccctgagcgatgatcttggggtgtatcgcaatgacagaatgcatcgcgcggttagcgccagcaggaggcgcgagttaagcgacagggaactgatgcacagtttgcaaagagctctgactggagctggaaccgagggtgagaattacttcgacatgggagctgacttgcagtggcagcctagtcgcagggctctgagcgccgcgacggcaggatgtgagcttccttacatagaagaggcggatgaaggcgaggaggaagagggcgagtacttggaagactga

SEQ ID NO: 704 - DNA, 1917 bp, Adenovirus B35
  MISC_FEATURE (1)..(1917): B35.orf00047 E2B terminal protein
atgaactacttcatgccgctacgcaacatttggaaccgcgtacgcgagtttcctcgggcttctactaccgccgcaggaatcacctggatgtccaggtacatctacggctatcaccgccttatgttggaagacctcgcccctggcgctccagctacagaacgatggcctctctaccgccaaccaccgccgcattttcttatagggtaccagtatctggtgcgcacctgcaacgattacatctttgacacccgcgcctattcgcgccttaaatacaccgagctcgtgcgccctggtcaccagacagttaactggtcagtcatggccaactgtgcttacaccattaatacaggggcttaccaccgctttgtggattttgatgactttcaagccacccttacccaagtacagcaagccatcctcgccgaaagagtcgtagctgacttggcactggtacaaccaatgcgcggatttggactcacacgtatgcatggcagaacgggtgaggaagaagtgcccgtagaacggctcatgcaagactactacaaagatcttgctagatgtcaggataatgcttggggaatggccaatcgcctgcgtatccagcaagccggacccaaagacctggtgctcctcgccaccatccgccgtcttagaactgcctactttaatttcatcaccagcagcatcgtctcaccttcccgagatgaagaagaaacagaagacccagaccgaacacataaccacccccgcccacaagaagccgtactcagcctaccttgtgactgtgactggttagacgctttcgtcgaaaggttttcagatcccgtggatcttgacacgatcagatctctgcgcgcagtccctacgggccaattaataaaatgtataatcagcgccctctccctcccaaacggagaacctcccagtcaccactttaaggagatgcgcggcggtgtttttactctgcgaccgcgcgagaacggccgcgccgtcactgaaaccatgcgccgccgccgcggagaggtcattgaacgattcatcgaccgtttgcccgtgcgccgtcgacgtcgccgcgtgccccctccgcccccgcctgaagacgaagaagagatgttagtggaagaagagatagaagaggaagaagagatcccgggagccttcgaacgcgaagtacgggccaccatagccgaactcatccgtcttctcgaggaggaattgaccgtgtccgcgcgaaactcccagttttttaattttgccgtggacttctacgaggccatggagcgcttggaagctctgggcgatgttagcgaaatgccgctgagacgatggatcatgtatttcttcgtcgccgaacacattgccaccacactcaactacctttttcagcgcctatgcaactatgcggtcttcaccagacacgtggagcttaacctcgctcaggtggtgatgcgcgcaagagactccgagggggccgtggtttacagccgcgtctggaacgaggcgggcatgaatgcattctcccaactcatgggccgtatctccaatgacctcgcggccaccgtcgaaagagcgggtcgcggagatcttcaggaggaagaaatcgagcagttcatggcggagatcgcctaccaggacaactctggtgacgtacaagaaatactgagacaagctgccgttaacgataccgaaattgattctgttgaactctctttcaggttcaagctcacggggccggtagctttcacccagagacgtcagatacaagacgtcaatcgacgcgtggtggcgcacgcaagtcttctcagagcgcaataccagaacctgcccgtgcgcggcgccgacgtgccactaccagccatgcccccgggtccggaacaaccgctgccgcccggcgcgcgtccccgtcaccgcttctga

SEQ ID NO: 705 - DNA, 3369 bp, Adenovirus B35
  MISC_FEATURE (1)..(3369): B35.orf00048 E2B DNA polymerase
atgcaagaagcaagagagccaccaccgatcaaaagaaaaaacaaaggtacggtagtggcgcccaaaggacacggaaccctgcaagccattgacgtctctacaaacgaacctgtggaaatcaagtaccatctgaacctcccgcacgccctggaaaagatcatgcaagttaatcttctgtccctacctactaacctgagtccgcagcgtctcaggactctggacagctccagcctgcgcgctctcgtccttcagctccgcccctcccgcgccgaggtctggacttgcctcccgcgggggctcgtcagcatgaccaccatcgaaacagaagatgaacaggccgatacagcgaatatagaagagcacgagatacaatcgccaggcctcggcttcccactgaaatttctcgtcaagggaagccaggtacagctcattcacgagatacaacccgtgcaacgctgcgactactgcggccgtctgtacaagcacaaacacgaatgctcggcgcgccgcagaaacttctacttccatcacatcaacagccaatcctccaactggtggcaggaaatccagttcttcccgatcggctctcatcctcgcacagaaagactcttcctgacctacgatgtggaaacttacacctggatgggatcctttggcaaacaactagttcctttcatgctggtcatgaaactctcaggagaagagcgtctcgtcaacatggcccacgatctagccattaaactcaagtgggatcgatggcaacaagaccccagaaccttctactgtgtcactccagaaaaaatggcaattggccggcattttcgtcagtatcgggaccagttacaaacagcactggcggtagatctttggtcatcattcctacatgcaaatcctcacctgcacgaatgggctctcgaacactacgccttatctgaccccacagacctaacctttgatgagctcagtaagctacctcacgtcagaggcacgccgcgtttcatagaattatacatcgtaggacacaacatcaacggtttcgacgaaatcgtcctagctgcccaggtgatcaacaatcgagcggaagtaccacagcctttccgcatcactcgcaattttatgcccagagccggtaagattctcttcaatgatgttactttcgctttgcccaaccccgcctacaagaaacgggtagacttccaactctgggaacagggagcctgtgacgacatggacttcaaataccaatttctcaaagtcatggtcagagacacctttgcccttactcacgcttcgctacgaaaagctgctcaagcatactctctacccgtagagaagggctgctgcccttacaaggcagttaatcagttctacatgctaggatcttaccgtgcagacaaagacgggtttccgctagaagagtactggaaggatcgcgaagaataccttctcaaccgcgaactgtgggaaaagaaaaaccaaccaggttatgacatcattcaagaaacacttgactactgcgccctagacgtacttgtcaccgccgaactggtaaccaagcttcaagaatcttatgcccactttgtcagagactctgtaggtctacctcatgcccatttcaacatttttcaaagacccaccatctcttccaattctcacgccatctttcgccagatcgtctacagaacagaaaaacccaatcgcaccaacttgggtccggggctgctagcgccatcacatgaactatatgactatgtgcgagcaagtatcagaggggggcgatgctatccaacctacataggcatctttgaggatcccatctacgtctatgacatctgtggcatgtatgcctctgctctcacccatcccatgccctggggcagtccccttaacccatatgagcgcgcactggcagctcgagaatggcaaatggccttagatgaccccactcccatcagctattttgataaggatttacttccgggaatctttaccatggatgcagaccctcccgatgaacttatgctagacccacttccccctttctgttctaggaaaggaggtaggctctgttggaccaatgaaccccttcgaggcgaggtggccaccagtgtggatttaattaccttgcataatcgagggtggcaagtgagaatcgtgccagatgaattaacaactatcttccccgaatggaagtgcctggcacgcgagtatgtccaactcaacatcgccgccaaagagcgcgcggacaaggaaaagaaccaaaccatgcgatccattgccaaacttttatccaacgccctgtatggatcatttgccaccaaacttgacaataaaaaaattgtgttttctgaccaaatggacgaaaacctcatgaaaggcatctcaaccggcactgtcaatatcaaatcctcctcgttcttagaaactgacaacctgagtgcagaggtcatgcccgccttcgagagggaatacctaccccaacagctgacgttcctggacagcgatccggaagacagtgaggaagagcaaagaaccgcccccttttatacccccccagcggggaccccaggtcacgtgaaatacacctacaagccaatcacattcctggatgttgaagagggtgacatgtgtttgcatactttggaaaaggtggaccccctggttgacaacgatcgctacccctcccacatagcctcctttgtgctggcctggacgcgcgcctttgtatcagagtggtcagagttcctgtacgaagaagaccgaggcactccactggagaagaggcctgtaaaatcagtctacggagatacggacagcctgtttgtcactcaacgaggacacgaacttatggagaccaaaggtaagaaacgcatcaaaaaatatggcggaaaacttgtttttgaccccaatgaaccggatttaacctggctggtggaatgtgaaactgtttgcgcctcctgcggcgcggatgcatactccccagaatccattttccttgcgcccaagctgtatgcgctgaaatgcctatactgcccggtatgcaagaaaacttccaaaggtaagctccgcgccaaaggccacgcagccgaggcgctcaactacgaactcatggtaaactgctacttggccgacatacagggcgccaagcgacagaagttctccaccagcagaatgagtctgaagcgcaccctggcaagcgcccaagcaggcgcacaccccttcactgtgacggaaacaaccctgactcgaacactgagaccctggaaggaccgaaccctggcagcgctggacgcccatcgtctcataccctactccaggagccgtccaaacccgcgaaacgaggaggtctgctggatcgagatgccatag

SEQ ID NO: 706 - DNA, 1047 bp, Adenovirus B35
  MISC_FEATURE (1)..(1047): B35.orf00049 E2B protein IVa2
atgcccatggctgacggtctaaaaccgctgaaaaacttttcctcactacaagaacttctatcactaggaggagagcgcctcctaatggatttggtgcgggaaaatatgcatgtaagggaaatgatgaacgaggtggcccccttgcttcgagaagacggcagttgccgttccctaaactaccacctgcaacctgtaatcggaattatttatggccccaccggatgtggcaaatctcaattgctcagaaacttgctatcatcccaactaatcacccccgcccccgaaacggtgttcttcatagccccccaggtggacatgattccaccctcagaactgaaagcttgggaaatgcaaatctgtgaggggaactatgctccggggcccgaaggaacattcataccccaatctggtacgctccgccccaaattcattaaaatggcttatgatgatttaactcaggaacataactatgatgtgtcagacccacggaacgtgtttgcccgcgccgctgcccacggccccattgctattatcatggatgagtgcatggaaaatctcggaggacacaagggtgtctccaaatttttccacgcttttccatccaagctgcacgataaatttcctaaatgtaccggatacaccgtcttggtagtccttcataacatgaacccaagacgggatcttggcggcaatattgccaacttaaaaatccaatccaaaatgcacataatttcacctcgaatgcacccctcccagctcaaccggtttgtaaacacctacaccaagggcttatctgtggcaatcagcctacttctaaaagatattgtgcaacaccatgcactgcgaccttgttatgactgggtgatttacaacactaccccggagcatgaatcccttcaatggagctatctccaccccaaagacggcctaatgcccatgtatctaaacattcaatcccacctctataggattctggaaaaaatccaccgagttctcaatgatcgagatcggtggtccagggcataccgtgcgcgaaaaatgaaataa

SEQ ID NO: 707 - DNA, 330 bp, Adenovirus B35
  MISC_FEATURE (1)..(330): B35.orf00051 E1B hexon associated protein IX
atgggatctactgtggatggaagacccgttcaacccgccaattcttcaacgctgacctatgctactttaagttcttcacctttggacgcagctgcagccgctgccgccgcctctgtcgccgctaacactgtgcttggaatgggttactatggaagcatcgtggctaattccacttcctctaataacccttctacactgactcaggacaagttacttgtccttttggcccagctggaggctttgacccaacgtctgggtgaactttctcagcaggtggccgagttgcgagtacaaactgagtctgctgtcggcacggcaaagtctaaataa

SEQ ID NO: 708 - DNA, 1221 bp, Adenovirus B35
  MISC_FEATURE (1)..(1221): B35.orf00060 E1B 55K protein
gtgcttactggatctacgtccactggacgggataggggcgttaagagggagagggcatccagtggtactgatgctagatctgagttggctttaagtttaatgagtcgcagacgtcctgaaaccatttggtggcatgaggttcagaaagagggaagggatgaagtttctgtattgcaggagaaatattcactggaacaggtgaaaacatgttggttggagccagaggatgattgggaggtggccattaaaaattatgccaagatagctttgaggcctgataaacagtataagatcagtagacggattaatatccggaatgcttgttacatatctggaaatggggctgaggtggtaatagatactcaagacaagacagttattagatgctgcatgatggatatgtggcctggagtagtcggtatggaagcagtcacttttgtaaatgttaagtttaggggagatggttataatggaatagtgtttatggccaataccaaacttatattgcatggttgtagcttttttggtttcaacaatacctgtgtagatgcctggggacaggttagtgtacgggggtgtagtttctatgcgtgttggattgccacagctggcagaaccaagagtcaattgtctctgaagaaatgcatattccaaagatgtaacctgggcattctgaatgaaggcgaagcaagggtccgtcactgcgcttctacagatactggatgttttattttaattaagggaaatgccagcgtaaagcataacatgatttgtggtgcttccgatgagaggccttatcaaatgctcacttgtgctggtgggcattgtaatatgctggctactgtgcatattgtttcccatcaacgcaaaaaatggcctgtttttgatcacaatgtgttgaccaagtgcaccatgcatgcaggtgggcgtagaggaatgtttatgccttaccagtgtaacatgaatcatgtgaaagtgttgttggaaccagatgccttttccagaatgagcctaacaggaatctttgacatgaacacgcaaatctggaagatcctgaggtatgatgatacgagatcgagggtgcgcgcatgcgaatgcggaggcaagcatgccaggttccagccggtgtgtgtagatgtgaccgaagatctcagaccggatcatttggttattgcccgcactggagcagagttcggatccagtggagaagaaactgactaa

SEQ ID NO: 709 - DNA, 543 bp, Adenovirus B35
  MISC_FEATURE (1)..(543): B35.orf00061 E1B 21K protein
atggaggtttgggccattttggaagaccttaggaagactaggcaactgttagagagcgcttcggacggagtctccggtttttggagattctggttcgctagtgaattagctagggtagtttttaggataaaacaggactataaacaagaatttgaaaagttgttggtagattgcccaggactttttgaagctcttaatttgggccatcaggttcactttaaagaaaaagttttatcagttttagacttttcaaccccaggtagaactgctgctgctgtggcttttcttacttttatattagataaatggatcccgcagactcatttcagcaggggatacgttttggatttcatagccacagcattgtggagaacatggaaggttcgcaagatgaggacaatcttaggttactggccagtgcagcctttgggtgtagcgggaatcctgaggcatccaccggtcatgccagcggttctggaggaggaacagcaagaggacaacccgagagccggcctggaccctccagtggaggaggcggagtag

SEQ ID NO: 710 - DNA, 234 bp, Adenovirus B35
  MISC_FEATURE (1)..(234): B35.orf00063 E1A 25.7 kDa protein
gtgagttttgtgcttcttattataggtcctgtgtctgatgctgatgaatcaccatctcctgattctactacctcacctcctgatattcaagcacctgttcctgtggacgtgcgcaagcccattcctgtgaagcttaagcctgggaaacgtccagcagtggagaaacttgaggacttgttacagggtggggacggacctttggacttgagtacacggaaacgtccaagacaataa

SEQ ID NO: 711 - DNA, 840 bp, Adenovirus B35
  MISC_FEATURE (1)..(840): B35.orf00064 E1A 29.1 kDa protein
atgtggtatttatggcagggtggagtatttgttcagggccaggtagactttgacccattacgtggaggtttcgattaccgtgttttttacctgaatttccgcgtaccgtgtcaaagtcttctgtttttacgtaggtgtcagctgatcgctagggtatttatacctcagggtttgtgtcaagaggccactcttgagtgccagcgagaagagttttctcctctgcgccggcagtttaataataaaaaaatgagagatttgcgatttctgcctcaggaaataatctctgctgagactggaaatgaaatattggagcttgtggtgcacgccctgatgggagacgatccggagccacctgtgcagctttttgagcctcctacgcttcaggaactgtatgatttagaggtagagggatcggaggattctaatgaggaagctgtgaatggcttttttaccgattctatgcttttagctgctaatgaaggattagaattagatccgcctttggacactttcaatactccaggggtgattgtggaaagcggtacaggtgtaagaaaattacctgatttgagttccgtggactgtgatttgcactgctatgaagacgggtttcctccgagtgatgaggaggaccatgaaaaggagcagtccatgcagactgcagcgggtgagggagtgaaggctgccaatgttggttttcagttggattgcccggagcttcctggacatggctgtaagtcttgtgaatttcacaggaaaaatactggagtaaaggaactgttatgttcgctttgttatatgagaacgcactgccactttatttacagtaagtgtgtttaa

SEQ ID NO: 712 - DNA, 129 bp, Artificial Sequence
  B35.orf00065 hypothetical protein
atgcgtaacatttcccgcgacaacttgcaaaaaaactccacccccataaaacgtcattttcccacggccgcgccgccccttttaaccgttaaccccacagccaatcaccacacggcccacactttttaa

SEQ ID NO: 713 - DNA, 141 bp, Artificial Sequence
  C1.orf00001 hypothetical protein
atgggaagtgacgtatcgtgggaaaacggaagtgaagatttgaggaagttgtgggttttttggctttcgtttctgggcgtaggttcgcgtgcggttttctgggtgttttttgtggactttaaccgttacgtcattttttag

SEQ ID NO: 714 - DNA, 387 bp, Adenovirus C1
  MISC_FEATURE (1)..(387): C1.orf00002 E4 ORF1 protein
atggctgccgctgtggaagcgctgtatgttgttctggagcgggagggtgctattttgcctaggcaggagggtttttcaggtgtttatgtgtttttctctcctattaattttgttatacctcctatgggggctgtaatgttgtctctacgcctgcgggtatgtattcccccgggctatttcggtcgctttttagcactgaccgatgttaaccaacctgatgtgtttaccgagtcttacattatgactccggacatgaccgaggaactgtcggtggtgctttttaatcacggtgaccagtttttttacggtcacgccggcatggccgtagtccgtcttatgcttataagggttgtttttcctgttgtaagacaggcttctaatgtttaa

SEQ ID NO: 715 - DNA, 444 bp, Adenovirus C1
  MISC_FEATURE (1)..(444): C1.orf00005 E4 ORF2 protein
atgtttttttttttgttattttattttgtgtttatgcaggaacccgcagacatgtttgagagaaaaatggtgtctttttctgtggtggttccggaacttacctgcctttatctgcatgagcatgactacgatgtgcttgcttttttgcgcgaggctttgcctgattttttgagcagcaccttgcattttatatcgccgcccatgcaacaagcttacatcggggctacgctggttagcatagctccgagtatgcgtgtcataatcagtgtgggttcttttgtcatggttcctggcggggaagtggccgcgctggtccgtgcagacctgcacgattatgttcagctggccctgcgaagggacctacgggatcgcggtatttttgttaatgttccgcttttgaatcttatacaggtctgtgaggaacctgaatttttgcaatcatga

SEQ ID NO: 716 - DNA, 351 bp, Adenovirus C1
  MISC_FEATURE (1)..(351): C1.orf00006 E4 ORF3 protein
atgattcgctgcttgaggctgaaggtggagggtgctctggagcagatttttacaatggccggacttaatattcgggatttacttagagacatattgataaggtggcgagatgaaaattatttgggcatggttgaaggtgctggaatgtttatagaggagattcaccctgaagggtttagcctttacgtccacttggacgtgagggcagtttgccttttggaagccattgtgcaacatcttacaaatgccattatctgttctttggctgtagagtttgaccacgccaccggaggggagcgcgttcacttaatagatcttcattttgaggttttggataatcttttggaataa

SEQ ID NO: 717 - DNA, 885 bp, Adenovirus C1
  MISC_FEATURE (1)..(885): C1.orf00009 E4 34K E4 34K protein
atgactacgtccggcgttccatttggcatgacactacgaccaacacgatctcggttgtctcggcgcactccgtacagtagggatcgcctacctccttttgagacagagacccgcgctaccatactggaggatcatccgctgctgcccgaatgtaacactttgacaatgcacaacgtgagttacgtgcgaggtcttccctgcagtgtgggatttacgctgattcaggaatgggttgttccctgggatatggttctgacgcgggaggagcttgtaatcctgaggaagtgtatgcacgtgtgcctgtgttgtgccaacattgatatcatgacgagcatgatgatccatggttacgagtcctgggctctccactgtcattgttccagtcccggttccttgcagtgcatagccggcgggcaggttttggccagctggtttaggatggtggtggatggcgccatgtttaatcagaggtttatatggtaccgggaggtggtgaattacaacatgccaaaagaggtaatgtttatgtccagcgtgtttatgaggggtcgccacttaatctacctgcgcttgtggtatgatggccacgtgggttctgtggtccccgccatgagctttggatacagcgccttgcactgtgggattttgaacaatattgtggtgctgtgctgcagttactgtgctgatttaagtgagatcagggtgcgctgctgtgcccggaggacaaggcgtcttatgctgcgggcggtgcgaatcatcgctgaggagaccactgccatgttgtattcctgcaggacggagcggcggcggcagcagtttattcgcgcgctgctgcagcaccaccgccctatcctgatgcacgattatgactctacccccatgtag

SEQ ID NO: 718 - DNA, 225 bp, Adenovirus C1
  MISC_FEATURE (1)..(225): C1.orf00010 E4 ORF6/7 protein
gtggctcagcagctggacagcaacatgaacttaagagagctgcccggggagtttattaatatcactgatgagcgtttggctcgacaggaaaccgtgtggaatataacacctaagaatatgtctgttacccatgatatgatgctttttaaggccagccggggagaaaggactgtgtactctgtgtgttgggagggaggtggcaggttgaatactagggttctgtga

SEQ ID NO: 719 - DNA, 168 bp, Adenovirus C1
  MISC_FEATURE (1)..(168): C1.orf00011 U protein
atgaaaatagtgggtgcggaggggcaggaacaagaggaatctgacatcccatttaaactgtggagaaagtttgcagctagaagacgactgaggtaccagagttgggaggagggaaaggaggtgctgctgaataaattggataaagatctgctaagtgattttaagtaa

SEQ ID NO: 720 - DNA, 1749 bp, Adenovirus C1; identical to SEQ ID NO: 142
  MISC_FEATURE (1)..(1749): C1.orf00012 L5 fiber protein 62 kDa

SEQ ID NO: 721 - DNA, 387 bp, Adenovirus C1
  MISC_FEATURE (1)..(387): C1.orf00013 E3 control protein 14.7 kDa
atgactgacggcctagatctagaaatggacggaattattaccgagcagcgtctgctacagaggcgcaaagcagcggcagagcaggaacgcctaaatcaggagctccaagacatggttaacctgcaccagtgtaaaagaggtattttttgtctggttaagcaggcaaaagttacctacgagaaggaccacagcaaccaccgccttagctacaagctgcccgccaagcgccaaaaactgctgcttatggtgggagaaaggcccatcaccgtcactcagcagtcagtagaaactgagggctgtctgcacttcccctgccagggtccagaggacctttgcacccttattaagactttatgcggtcttagagatcttattccctttaactaa

SEQ ID NO: 722 - DNA, 402 bp, Adenovirus C1
  MISC_FEATURE (1)..(402): C1.orf00014 E3 14.9 kDa protein
atgaaaattacttggattttcttactaattttttacaccttaactgtggtttgctcccagacctccaagcctccccaaagacatgtatcttgcagatttactcgtatatggaacattccaagttgctacactgaaaaaagcgacctgtccgaaacctggttgtatgccatcatctcggtttttgtattttgtagcaccataattgcactagccatatacccctacctggatattggatggaacgccatagacgccatgagccattccactttccccgcgcccgctataattcagatgcagccaattgttgccggcggcattgtcccagccaatcagcatcgccctccttctcccactcccactgagattagctactttaatctaacaggcggagatgactga

SEQ ID NO: 723 - DNA, 276 bp, Adenovirus C1
  MISC_FEATURE (1)..(276): C1.orf00015 E3 RID-alpha
atgattcctcgagtttttatattattgacccttattgcgcttttctgcgcgtgctccacattggccgcggttgctaacatcgaagtagactgcattccagccttcacagtctacctgctttacggatttgtcacccttacgctcatctgcagcctcatcactgtagtgatcgcctttattcaatgcattgactgggtctgtgtgcgcattgcataccttagacaccatcctcaatacagagacacggccatagctgagcttcttagaattctttaa

SEQ ID NO: 724 - DNA, 417 bp, Adenovirus C1
  MISC_FEATURE (1)..(417): C1.orf00016 E3 10.7 kDa protein
atgtgccaggttggcaaggcaagacacacgcctacaaccttaaagtcaggctttcctggactgagagcgcctgacttcaacagcacctgccccgtggagttcatccagcaacttcagcagcccgccttcgacatggtcgacacagtgaactcttacaacaccgctaccggactcacatctacccaagatatgccccaagtttctacctttgttaataattgggcaaacttgggcatgtggtggttttcaatagcgcttatgtttgtctgccttattattatgtggctttcctgctgcctaaagcgcaaacgcgcccgaccacccatttataagcccattattgtgcttaacccaaacaatgatggaatacatagattggacgggctgaacacttgttctttttcttttgcagtatga

SEQ ID NO: 725 - DNA, 123 bp, Artificial Sequence
  C1.orf00017 hypothetical protein
atgtcttgcaacgcccccctcaaagctccccactttaccctgcttaatgtcattcccatggacaatggactctgtggaatatgtgccaggttggcaaggcaagacacacgcctacaaccttaa

SEQ ID NO: 726 - DNA, 483 bp, Adenovirus C1
  MISC_FEATURE (1)..(483): C1.orf00021 E3 glycosylated membrane protein 18.6 kDa
atgattaaatacatcattttaagcttgcttaccctagcggcagtctgcagtgctgccaaacaggtagagtttaaggagccagcttgcaatgttacatttaaatccgaagctaatgaatgcaccactcttataaaatgcaccacagaacatgaaaagcttattattcgccacaaagacaaagctggcaagtatgctgtatatgctatttggcagcctggagaccctaacaactataatgttacagtttttcagggtaatgattctaaagtttttttgtatgaatttccattttatgaaatgtgtgacattaccatgtacatgagcaaacagtataagttgtggcccccacaaaagtgtgtggagaacactggcactttttgctttactgctctcctgattacagtgattactttggtgtgtaccctcctttatattaaatttaaaagcagacgcagctttattgaagaaaagaaaatgccttag

SEQ ID NO: 727 - DNA, 129 bp, Adenovirus C1
  MISC_FEATURE (1)..(129): C1.orf00022 E3 CR1-alpha1
atgttggttaacaatcaggcggtgggtgcggcgaccggtgacgcactggtacgttcccggcaggtaaggagggtgattttttctgataagcccggagaggttgtccgcggctcactccgtcttggttga

SEQ ID NO: 728 - DNA, 324 bp, Adenovirus C1
  MISC_FEATURE (1)..(324): C1.orf00024 E3A 12 kDa protein
atgactagtggagaggcagagcaactgcgcctaacacaccttgaccactgccgccgccacaagtgctttgcccgcggctccggtgagttttgttactttgagttgcccgaagagcatatcgagggcccggcgcacggcgtccggctcaccacccaggtagagcttactcgtagcctaattcgggagtttaccctgcgccccctgctagtggagcgggagaggggtccctgtgttctgaccgtggtttgcaactgtcctaaccctggattacatcaagatctttgttgccatctctgtactgagtataataaatacagaaattag

SEQ ID NO: 729 - DNA, 684 bp, Adenovirus C1
  MISC_FEATURE (1)..(684): C1.orf00025 L4 VIII capsid protein
atgagcaaggaaattcccacgccctacatgtggagttaccagccacaaatgggacttgcggctggagctgcccaagactactcaacccgaataaactacatgagcgcgggaccccacatgatatcccgggtcaacggaatacgcgcccaccgaaaccgaattctcctggaacaggcggctattaccaccacacctcgtaataaccttaatccccgtagttggcccgctgccctggtgtaccaggaaagtcccgctcccaccactgtggtacttcccagagacgcccaggccgaagttcagatgactaactcaggggcgcagcttgcgggcggctttcgtcacagggtgcggtcgcccgggcagggtataactcacctgaaaatcagagggcgaggtattcagctcaacgacgagtcggtgagctcctcgcttggtctccgtccggacgggacatttcagatcggcggtgccggccgctcttcatttacgccccgtcaggcgatcttaactctgcaaacctcatcctcggagccgcgctccggaggcattggaactctacaatttattgaggagttcgtgccttcggtttacttcaaccccttttctggacctcctggccactacccggaccagtttattcccaactttgacgcggtgaaggactcggcggacggctacgactga

SEQ ID NO: 730 - DNA, 465 bp, Adenovirus C1
  MISC_FEATURE (1)..(465): C1.orf00027 E2a_2 virion morphogenesis-associated protein 25 kDa
gtgggggcaacatctccttcgcccgccgctttcttctctaccatcacggcgtggccttcccccgtaacatcctgcattactaccgtcatctctacagcccctactgcaccggcggcagcggcagcaacagcagcggccacacagaagcaaaggcgaccggatagcaagactctgacaaagcccaagaaatccacagcggcggcagcagcaggaggaggagcgctgcgtctggcgcccaacgaacccgtatcgacccgcgagcttagaaacaggatttttcccactctgtatgctatatttcaacagagcaggggccaagaacaagagctaaaaataaaaaacaggtctctgcgatccctcacccgcagctgcctgtatcacaaaagcgaagatcagcttcggcgcacgctggaagacgcggaggctctcttcagtaaatactgcgcgctgactcttaaggactag

SEQ ID NO: 731 - DNA, 2424 bp, Adenovirus C1
  MISC_FEATURE (1)..(2424): C1.orf00029 L5 hexon assembly-associated protein 90 kDa
atggagtcagtcgagaaggaggacagcctaaccgccccctctgagttcgccaccaccgcctccaccgatgccgccaacgcgcctaccaccttccccgtcgaggcacccccgcttgaggaggaggaagtgactatcgagcaggacccaggttttgtaagcgaagacgacgaggaccgctcagtaccaacagaggataaaaagcaagaccaggacgacgcagaggcaaacaaggagcaagtcgggcggggggacgagaggcatggcgactacctagatgtgggagacgacgtgctgttgaagcatctgcagcgccagtgcgctattatctgcgacgcgttgcaagagcgcagcgatgtgcccctcgccatagcggatgttagccttgcctacgaacgccacctgttctcaccgcgtgtaccccccaaacgacaagaaaacggcacatgcgagcccaacccgcgcctcaacttctaccccgtatttgccgtgccagaggtgcttgccacctatcacatctttttccaaaactgcaagatacccctatcctgccgtgccaaccgcagccgagcggacaagcagctggccttgcggcagggcgctgtcatacctgatatcgcctcgctcgacgaagtgccaaaaatctttgagggtcttggacgcgacgagaagcgcgcggcaaacgctctgcaacaagaaaacagcgaaaatgaaagtcattgtggagtgctggtggaacttgagggtgacaacgcgcgcctagccgtgctaaaacgcagcatcgaggtcacccactttgcctacccggcacttaacctaccccccaaggttatgagcacagtcatgagcgagctgattgtgcgccgtgcacaacccctggagagggatgcaaacttgcaagaacaaaccgaggagggcctacccgcagttggcgatgagcagctggcgcgctggcttgagacgcgcgagcctgccgacttggaggagcgacgcaagctaatgatggccgcagtgcttgttaccgtggagcttgagtgcatgcagcggttctttactgacccgaagatgcagcgcaagctagaggaaacattgcactacacctttcgccagggctacgtgcgccaggcctgcaaaatttccaacgtggagctctgcaacctggtctcctaccttggaattttgcacgaaaaccgcctcgggcaaaacgtgcttcattccacgctcaagggcgaggcgcgccgcgactacgtccgcgactgcgtttacttatttctatgctacacctggcaaacggccatgggcgtgtggcagcagtgcctggaggagcgcaacctgaaggagctgcagaagctgctaaagcaaaacttgaaggacctatggacggccttcaacgagcgctccgtggccgcgcacctggcggacattatcttccccgaacgcctgcttaaaaccctgcaacagggtctgccagacttcaccagtcaaagcatgttgcaaaactttaggaactttatcctagagcgttcaggaatcctgcccgccacctgctgtgcgcttcctagcgactttgtgcccattaagtaccgtgaatgccctccgccgctttggggtcactgctaccttctgcagctagccaactaccttgcctaccactccgacatcatggaagacgtgagcggtgacggcctactggagtgtcactgtcgctgcaacctatgcaccccgcaccgctccctggtctgcaattcgcagctgcttagcgagagtcaaattatcggtacctttgagctgcagggtccctcgcctgacgaaaagtccgcggctccggggttgaaactcactccggggctgtggacgtcggcttaccttcgcaaatttgtacctgaggactaccacgcccacgagattaggttctacgaagaccaatcccgcccgcccaatgcggagcttaccgcctgcgtcattacccagggccacatccttggccaattgcaagccatcaacaaagcccgccaagagtttctgctacgaaagggacggggggtttacttggacccccagtccggcgaggagctcaacccaattcccccgccgccgcagccctatcagcagcagccgcgggcccttgcttcccaggatggcacccaaaaagaagctgcagctgccgccgccacccacggacgaggaggaatactgggacagtcaggcagaggaggttttggacgaggaggaggaggacatgatggaagactgggagagcctagacgaggaagcttccgaggccgaagaggtgtcagacgaaacaccgtcaccctcggtcgcattcccctcgccggcgccccagaaatcggcaaccggtccaagcatggctacaacctccgctcctcaggcgccgccggcactgcccgttcgccgacccaaccgtag

SEQ ID NO: 732 - DNA, 1590 bp, Adenovirus C1
  MISC_FEATURE (1)..(1590): C1.orf00030 E2a_1 DNA-binding protein 59 kDa
atggccagtcgggaagaggagcagcgcgaaaccacccccgagcgcggacgcggtgcggcgcgacgtccaccaaccatggaggacgtgtcgtccccgtcgccgtcgccgccgcctccccgcgcgcccccaaaaaagcggctgaggcggcgtctcgagtccgaggacgaagaagactcgtcacaagacgcgctggtgccgcgcacacccagcccgcggccatcaacctcggcggcggatttggccaacgcgcccaagaagaaaaagaagcgcccatctcccaagcccgagcgcccgccatccccagaggtgattgtggacagcgaggaagaaagagaagatgtggcgctacaaatggtgggtttcagcaacccaccggtgctaattaagcacggcaagggaggtaagcgcacggtgcggcggctgaatgaagacgacccagtggcgcggggtatgcggatgcaagaggaagaggaagagcccagcgaagcggaaagtgaaagcacggtaatgaacccgctgagtctgccgatcgtgtctgcgtgggagaagggcatggaggctgcgcgcgcgctgatggacaagtatcacgtggataacgatctaaaggcgaacttcaagctactgcctgaccaagtggaagccctggcggccgtatgtaagacctggctgaacgaggagcaccgcgggttgcagctgacctttaccagcaacaagacctttgtgacgatgatggggcgattcctgcaagcgtacctgcagtcgtttgcagaggtgacctacaagcaccacgagcccacgggctgcgcgttgtggctgcaccgctgcgctgagatcgaaggcgagcttaagtgtctacacgggagcattatgataaacaaggagcacgtgattgaaatggatgtgacgagcgaaaacgggcagcgcgcgctgaaggagcagtctagcaaggccaagattgtgaagaaccgttggggccgaagcgtggtacagatctccaacaccgacgcgaggtgctgcgtgcacgacgcggcctgtccggcgaatcagttttccggcaagtcttgcggcatgtttttttccgaaggcgcaaaggcccaggtggcttttaagcagatccaggcctttatgaaggcgctgtatcctaacgcccagaccgggcacggtcaccttctgatgccactacggtgcgagtgcaactcaaagcctgggcatgcaccctttttgggaaggcagctaccaaagttgactccgttcgccctgagcaacgcggaggacctggacgcggatctgatctccgacaagagcgtgctggccagcgtgcatcacccggcgctgatagtgttccagtgctgcaaccctgtgtatcgcaactcgcgcgcgcagggcggaggccccaactgcgacttcaagatatcggggcccgacctgctaaacgcgttggtgatggtgcgcagcctgtggagtgaaaacttcaccgagctgccgcggatggttgtgcctgagtttaagtggagcactaaacaccagtatcgcaacgtgtccctgccagtggcgcatagcgatgcgcggcagaacccctttgatttttaa

SEQ ID NO: 733 - DNA, 615 bp, Adenovirus C1
  MISC_FEATURE (1)..(615): C1.orf00033 L3 protease
atgggctccagtgagcaggaactaaaagccattgtcaaagatcttggttgtggaccatattttttgggcacctatgacaagcgcttcccaggctttgtttccccacacaagctcgcctgcgccatagttaacacggccggtcgcgagactgggggtgtacactggatggcctttgcctggaacccgcgctcaaaaacatgctacctctttgagccctttggcttttctgaccaacgtctcaagcaggtttaccagtttgagtacgagtcactcctgcgccgtagcgccattgcctcttcccccgaccgctgtataacgctggaaaagtccacccaaagcgtgcaggggcccaactcggccgcctgtggcctattctgctgcatgtttctccacgcctttgccaactggccccaaactcccatggatcacaaccccaccatgaaccttattacaggggtacccaactccatgcttaacagtccccaggtacagcccaccctgcgccgcaaccaggaacagctctacagcttcctggagcgccactcgccctacttccgcagccacagtgcgcaaattaggagcgccacttctttttgtcacttgaaaaacatgtaa

SEQ ID NO: 734 - DNA, 2880 bp, Adenovirus C1; identical to SEQ ID NO: 202
  MISC_FEATURE (1)..(2880): C1.orf00035 L4 hexon protein 109 kDa

SEQ ID NO: 735 - DNA, 753 bp, Adenovirus C1
  MISC_FEATURE (1)..(753): C1.orf00036 pVI hexon-associated protein 27 kDa
atggaagacatcaactttgcgtctctggccccgcgacacggctcgcgcccgttcatgggaaactggcaagatatcggcaccagcaatatgagcggtggcgccttcagctggggctcgctgtggagcggcattaaaaatttcggttccaccgttaagaactatggcagcaaggcctggaacagcagcacaggccaaatgctgagggacaagttgaaagagcaaaatttccaacaaaaggtggtagatggcctggcctctggcattagcggggtggtggacctggccaaccaggcagtgcaaaataagattaacagtaagcttgatccccgccctcccgtagaggagcctccaccggccgtggagacagtgttgccagatgggcgtggcgaaaagcgcccgcgccccgacagggaagagactctggtgacacaaatcgacgagcctccctcgtacgaggaggcgctaaagcaaggcctgcccaccacccgtcccatcgcgcccatggctaccggagtgttgggccagcacacacctgtaacgctggacctgcctccccccgctgacacccagcagaaacctgtgctgccagggccgtccgccgttgttgtaacccgccctagccgcgcgtccctgcgccgtgccgccagcggtccgcgatcgttgcggcccgtagccagtggcaactggcaaagcacactgaacagcatcgtgggtctgggggtgcaatccctaaagcgccgacgatgcttttga

SEQ ID NO: 736 - DNA, 243 bp, Adenovirus C1
  MISC_FEATURE (1)..(243): C1.orf00039 L2 X core protein
atggccctcacctgccgcctccgtttcccggtgccgggattccgaggaagaatgcaccgtaggaggggcatggccggccacggcctgacgggcggcatgcgtcgtgcgcaccaccggcggcggcgcgcgtcgcaccgtcgcatgcgcggcggtatcctgcccctccttattccactgatcgccgcggcgattggcgccgtgcccggaattgcatccgtggccttgcaggcgcagagacactga

SEQ ID NO: 737 - DNA, 1140 bp, Adenovirus C1
  MISC_FEATURE (1)..(1140): C1.orf00042 pV minor core protein 42 kDa
atgtatccagcggcggcggcgcgcatcgaagctatgtccaagcgcaaaatcaaagaagagatgctccaggtcatcgcgccggagatctatggccccccgaagaaggaagagcaggattacaagccccgaaagctaaagcgggtcaaaaagaaaaagaaagatgatgatgatgaacttgacgacgaggtggaactgttgcacgcgaccgcgcccaggcggcgggtacagtggaaaggtcgacgcgtaagacgtgttttgcgacccggcaccaccgtagtctttacgcccggtgagcgctccacccgcacctacaagcgcgtgtatgatgaggtgtacggcgacgaggacctgcttgagcaggccaacgagcgcctcggggagtttgcctacggaaagcggcataaggacatgctggcgttgccgctggacgagggcaacccaacacctagcctaaagcccgtgacactgcagcaggtgctgcccgcgcttgcaccgtccgaagaaaagcgcggcctaaagcgcgagtctggtgacttggcgcccaccgtgcagctcatggtgcccaagcgccaacgactggaagatgtcttggaaaaaatgaccgtggagcctgggctggagcccgaggtccgcgtgcgaccaatcaagcaggtggcaccgggactgggcgtgcagaccgtggacgttcagatacccaccaccagtagcactagtattgccactgccacagagggcatggagacacaaacgtccccggtcgcctcggcggtggcagatgccgcggtgcaggcggccgctgcggccgcgtccaaaacctctacggaggtgcaaacggacccgtggatgtttcgcgtttcagccccccggcgtccgcgccgttcgaggaagtacggcgccgccagcgcgctactgcccgaatatgccctacatccttccatcgcgcctacccccggctatcgtggctacacctaccgccccagaagacgagcaactacccgacgccgaatcaccactggaacccgccgccgccgtcgccgtcgccagcccgtgctggccccgatttccgtgcgcagggtggctcgcgaaggaggcaggaccctggtgctgccaacagcgcgctaccaccccagcatcgtttaa

SEQ ID NO: 738 - DNA, 597 bp, Adenovirus C1
  MISC_FEATURE (1)..(597): C1.orf00043 L2 VII core protein
atgtccatccttatatcgcccagcaataacacaggctggggcctgcgtttcccaagcaagatgtttggcggggccaagaagcgctccgaccaacacccagtgcgcgtgcgcgggcactaccgcgcgccctggggcgcgcacaaacgcggccgcactgggcgcaccaccgtcgatgacgccatcgacgcggtggtggaggaggcgcgcaactacacgcccacgccgccgccagtgtccaccgtggacgcggccattcagaccgtggtgcgcggagcccggcgctatgctaaaatgaagagacggcggaggcgcgtagcacgtcgccaccgccgccgacccggcactgccgcccaacgcgcggcggcggccctgcttaaccgcgcacgtcgcaccggccgacgggcggccatgcgagccgctcgaaggctggccgcgggtattgtcactgtgccccccaggtccaggcgacgagcggccgccgcagcagccgcggccattagtgctatgactcagggtcgcaggggcaacgtgtactgggtgcgcgactcggttagcggcctgcgcgtgcccgtgcgcacccgccccccgcgcaactag

SEQ ID NO: 739 - DNA, 1725 bp, Adenovirus C1; identical to SEQ ID NO: 174
  MISC_FEATURE (1)..(1725): C1.orf00046 L3_1 penton protein 64 kDa

SEQ ID NO: 740 - DNA, 1758 bp, Adenovirus C1
  MISC_FEATURE (1)..(1758): C1.orf00047 L1 IIIa capsid protein
atgatgcaagacgcaacggacccggcggtgcgggcggcgctgcagagccagccgtccggccttaactccacggacgactggcgccaggtcatggaccgcatcatgtcgctgactgcgcgcaaccctgacgcgttccggcagcagccacaggccaaccggctctccgcaattctggaagcggtggtcccggcgcgcgcaaaccccacgcacgagaaggtgctggcgatcgtaaacgcgctggccgaaaacagggccatccggcccgatgaggccggcctggtctacgacgcgctgcttcagcgcgtggctcgttacaacagcggcaacgtgcagaccaacctggaccggctggtgggggatgtgcgcgaggccgtggcgcagcgtgagcgcgcgcagcagcagggcaacctgggctccatggttgcactaaacgccttcctgagtacacagcccgccaacgtgccgcggggacaggaggactacaccaactttgtgagcgcactgcggctaatggtgactgagacaccgcaaagtgaggtgtaccagtccgggccagactattttttccagaccagtagacaaggcctgcagaccgtaaacctgagccaggctttcaagaacttgcaggggctgtggggggtgcgggctcccacaggcgaccgcgcgaccgtgtctagcttgctgacgcccaactcgcgcctgttgctgctgctaatagcgcccttcacggacagtggcagcgtgtcccgggacacatacctaggtcacttgctgacactgtaccgagaggccataggtcaggcgcatgtggacgagcatactttccaggagattacaagtgttagccgcgcgctggggcaggaggacacgggcagcctggaggcaaccctgaactacctgctgaccaaccggcggcagaagatcccctcgttgcacagtttaaacagcgaggaggagcgcattttgcgctatgtgcagcagagcgtgagccttaacctgatgcgcgacggggtaacgcccagcgtggcgctggacatgaccgcgcgcaacatggaaccgggcatgtatgcctcaaaccggccgtttatcaatcgcctaatggactacttgcatcgcgcggccgccgtgaaccccgagtatttcaccaatgccatcttgaacccgcactggctaccgccccctggtttctacaccgggggatttgaggtgcccgagggtaacgatggattcctctgggacgacatagacgacagcgtgttttccccgcaaccgcagaccctgctagagttgcaacagcgcgagcaggcagaggcggcgctgcgaaaggaaagcttccgcaggccaagcagcttgtccgatctaggcgctgcggccccgcggtcagatgctagtagcccatttccaagcttgatagggtctcttaccagcactcgcaccacccgcccgcgcctgctaggcgaggaggagtacctaaacaactcgttgctgcagccgcagcgcgaaaagaacctgcctccggcgtttcccaacaacgggatagagagcctagtggacaagatgagtagatggaagacgtatgcgcaggagcacagggatgtgcccggcccgcgcccgcccacccgtcgtcaaaggcacgaccgtcagcggggtctggtgtgggaggacgatgactcggcagacgacagcagcgtcctggatttgggagggagtggcaacccgtttgcgcaccttcgccccaggctggggagaatgttttaa

SEQ ID NO: 741 - DNA, 1248 bp, Adenovirus C1
  MISC_FEATURE (1)..(1248): C1.orf00049 L1 52 kDa protein
atgcatccggtgctgcggcagatgcgcccccctcctcagcagcggcaagagcaagagcagcggcagacatgcagggcaccctccccttctcctaccgcgtcaggaggggcaacatccgcggctgacgcggcggcagatggtgattacgaacccccgcggcgccgggcccggcactacctggacttggaggagggcgagggcctggcgcggctaggagcgccctctcctgagcgacacccaagggtgcagctgaagcgtgacacgcgcgaggcgtacgtgccgcggcagaacctgtttcgtgaccgcgagggagaggagcccgaggagatgcgggatcgaaagttccatgcagggcgcgagttgcggcatggcctgaaccgcgagcggttgctgcgcgaggaggactttgagcccgacgcgcggaccgggattagtcccgcgcgcgcacacgtggcggccgccgacctggtaaccgcgtacgagcagacggtgaaccaggagattaactttcaaaaaagctttaacaaccacgtgcgcacgcttgtagcgcgcgaggaggtggctataggactgatgcatctgtgggactttgtaagcgcgctggagcaaaacccaaatagcaagccgctcatggcgcagttgtttcttatagtgcagcacagcagggacaacgaggcattcagggatgcgctgttaaacatagtagagcccgagggccgctggctgctcgatttgataaatattctgcagagcatagtggtgcaggagcgcagcttgagcctggctgacaaggtggccgccattaactattccatgctcagtctgggcaagttttacgcccgcaagatataccataccccttacgttcccatagacaaggaggtaaagatcgaggggttctacatgcgcatggcgctgaaggtgcttaccttgagcgacgacctgggcgtttatcgcaacgagcgcatccacaaggccgtgagcgtgagccggcggcgcgagctcagcgaccgcgagctgatgcacagcctgcaaagggccctggctggcacgggcagcggcgatagagaggccgagtcctactttgacgcgggcgctgacctgcgctgggccccaagccgacgcgccctggaggcagctggggccggacctgggctggcggtggcacccgcgcgcgctggcaacgtcggcggcgtggaggaatatgacgaggacgatgagtacgagccagaggacggcgagtactaa

SEQ ID NO: 742 - DNA, 282 bp, Artificial Sequence
  C1.orf00050 hypothetical protein
atgctttcgctttccagcctaaccgcttacgccgcgcgcggccagtggccaaaaaaagctagcgcagcagccgccgcgcctggaaggaagccaaaaggagcgctcccccgttgtctgacgtcgcacacctgggttcgacacgcgggcggtaaccgcatggatcacggcggacggccggatacggggctcgaaccccggtcgtccgccatgatacccttgcgaatttatccaccagaccacggaagagtgcccgcttacaggctctccttttgcacggtctag

SEQ ID NO: 743 - DNA, 150 bp, Adenovirus C1
  MISC_FEATURE (1)..(150): C1.orf00051 E2B DNA terminal protein
atgtacctggacatccaggtgatgccggcggcggtggtggaggcgcgcggaaagtcgcggacgcggttccagatgttgcgcagcggcaaaaagtgctccatggtcgggacgctctggccggtcaggcgcgcgcagtcgttgacgctctag

SEQ ID NO: 744 - DNA, 1839 bp, Adenovirus C1
  MISC_FEATURE (1)..(1839): C1.orf00053 E2B DNA terminal protein
atgttggaagacctcgcccccggagccccggccaccctacgctggcccctctaccgccagccgccgccgcactttttggtaggataccagtacctcgtgcggacttgcaacgactacgtctttgactcaagggcttactcgcgtctcagatacaccgagctctcgcagccgggccaccagaccgttaactggtccgttatggccaactgcacttacaccatcaacacgggcgcataccaccgctttgttgacatggatgacttccagtctaccctcacgcaggtgcagcaggccatattagccgagcgcgttgtcgccgacctggccctgcttcagccaatgaggggcttcggggtcacacgcatgggaggaagagggcgccacctacggccaaactccgccgccgccgcagcgatagatgcaagagatgcaggacaagaggaaggagaagaagaagtgccggtagaaaggctcatgcaagactactacaaagacctgcgccgatgtcaaaacgaagcctggggcatggccgaccgcctgcgcattcagcaggccggacccaaggacatggtgcttctgtcgaccatccgccgtctcaagaccgcctactttaattacatcatcagcagcacctccgccagaaacaaccccgaccgccgcccgctgccgcccgccacggtgctcagcctaccttgcgactgtgactggttagacgcctttctcgagaggttttccgatccggtcgatgcggactcgctcaggtccctcggtggcggagtacctacacaacaattgttgagatgcatcgttagcgccgtatccctgccgcacggcagccccccgccaacccataaccgggacatgacgggcggcgtcttccaactgcgcccccgcgagaacggccgcgccgtcaccgagaccatgcgccgtcgccgcggggagatgatcgagcgctttgtcgaccgcctcccggtgcgccgtcgtcgccgccgtgtcccccctcccccaccgccgccagaagaagaagaaggggaggcccttatggaagaggagattgaagaagaagaggcccctgtagcctttgagcgcgaggtgcgcgacactgtcgccgagctcatccgtcttctggaggaggagttaaccgtgtcggcgcgcaactcccagtttttcaacttcgccgtggacttctacgaggccatggagcgccttgaggccttgggggatatcaacgaatccacgttgcgacgctgggttatgtacttcttcgtggcagaacacaccgccaccaccctcaactacctctttcagcgcctgcgaaactacgccgtcttcgcccggcacgtggagctcaatctcgcgcaggtggtcatgcgcgcccgcgatgccgaagggggcgtggtctacagccgcgtctggaacgagggaggcctcaacgccttctcgcagctcatggcccgcatctccaacgacctcgccgccaccgtggagcgagccggacgcggagatctccaggaggaagagatcgagcagttcatggccgagatcgcctatcaagacaactcaggagacgtgcaggagattttgcgccaggccgccgtcaacgacaccgaaattgattctgtcgaactctctttcaggttcaagctcaccgggcccgtcgtcttcacgcagaggcgccagattcaggagatcaaccgccgcgtcgtcgcgttcgccagcaacctccgtgcgcagcaccagctcctgcccgcgcgcggcgccgacgtgcccctgccccctctcccggcgggtcccgagccccccctacctccgggggcccgcccgcgtcaccgcttttag

SEQ ID NO: 745 - DNA, 3309 bp, Adenovirus C1
  MISC_FEATURE (1)..(3309): C1.orf00055 E2B DNA polymerase
ttgcaagccatcgacgccgccaccaaccagcccctggaaatcaggtatcacctggacctagcccgcgccctgacccggctatgcgaggtaaacctgcaggagctcccgcctgacctgacgccgcgggagctccagaccatggacagctcccatttgcgcgatgttgtcatcaagctccgaccgccgcgcgcggacatctggactttgggctcgcgcggcgtggtggtccgatccaccgtaactcccctcgagcagccagacggtcaaggacaagcagccgaagtagaagaccaccagccaaacccgccaggcgaggggctcaaattcccactctgcttccttgtgcgcggtcgtcaggtcaacctcgtgcaggatgtacagcccgtgcaccgctgccagtactgcgcacgtttttacaaaagccagcacgagtgttcggcccgtcgcagggacttctactttcaccacatcaacagccactcctccaactggtggcgggagatccagttcttcccgatcggctcgcatcctcgcaccgagcgtctctttgtcacctacgatgtagagacctatacttggatgggggcctttgggaagcagctcgtgcccttcatgctggtcatgaaattcggcggagatgagcctctagtgaccgccgcgcgagacctagccgtggaccttggatgggaccgctgggaacaagacccgcttaccttctactgcatcaccccagaaaaaatggccgtaggtcgccagtttaggacctttcgcgaccatctgcaaatgctaatggcccgtgacctgtggagctcattcgttgcttccaaccctcatcttgcagactgggccctgtcagagcacgggctcaactcccctgaagagcttacctacgaagaacttaaaaaattgccctccattaagggcaccccgcgcttcttggaactttacatcgtgggccacaacatcaacggctttgacgagatcgtgctcgccgcccaggtaattaacaaccgttccgaggtgccgggacccttccgcatcacacgcaattttatgcctcgcgcgggaaagatactcttcaacgatgtcaccttcgccctaccaaacccgcgttccaaaaagcgcacggactttttgctctgggagcagggcggatgcgacgacactgacttcaaataccagtacctcaaagtcatggtcagggacacctttgcgctcacccacacctcgctccggaaggccgcgcaggcatacgcgctacccgtagaaaagggatgctgcgcctaccaggccgtcaaccagttctacatgctaggctcttaccgttcggaggccgacgggtttccgatccaagagtactggaaagaccgcgaagagtttgtcctcaaccgcgagctgtggaaaaaaaagggacaggataagtatgacatcatcaaggaaaccctggactactgtgccctagacgtgcaggtcaccgccgagctggtcaacaagctgcgcgactcctacgcctccttcgtgcgtgatgcggtaggtcttacagacgccagcttcaacgtcttccagcgtccaaccatatcatcgaactcgcatgccatcttcaggcagatcgtcttccgagcagagcagcccgcccgtagcaacctcggtcccgaactcctcgccccctcgcacgaactatacgattacgtgcgcgccagcatccgcggtggaagatgctaccctacatatcttggaatactcagggagcccctctacgtttacgacatctgcggcatgtacgcctccgcgctcacccaccccatgccatggggtcccccactcaacccatacgagcgcgcgcttgccgcccgcgcatggcagcaggcgttagacttgcaaggatgcaagatagactacttcgacgcgcgcctgttgcccgggatctttaccgtggacgcggaccccccggacgagacgcagctagaccccctaccgccattctgctcgcgcaagggcggccgcctctgctggaccaacgagcgcctacgcggagaggtagccaccagcgttgaccttgtcaccctgcacaaccgcggttggcgcgtgcacctggtgcccgacgagcgcaccaccgtctttcccgaatggcggtgcgttgcgcgcgaatacgtgcagctaaacatcgcggccaaggagcgcgccgatcgcgacaaaaaccaaaccctgcgctccatcgccaagttgctgtccaacgccctctacgggtcgtttgccaccaagcttgacaacaaaaagattgtcttttctgaccagatggacgcggccaccctcaaaggcatcaccgcgggccaggtgaatatcaaatcctcctcgtttttggaaactgacaaccttagcgcagaagtcatgcccgctttccagagggagtactcaccccaacagctggccctcgcagacagcgatgcggaagagagtgaggacgaacgcgcccccacccccttttatacccccccttcaggaacacccggtcacgtggcatacacctataaaccaatcaccttccttgatgccgaagagggggacatgtgtcttcacaccctggagcgagtggaccccctagtggacaacgaccgctacccctcccacttagcctccttcgtgctggcctggacgcgagccttcgtctcagagtggtccgagtttctatacgaggaggaccgcggaacaccgctcgaggacaggcctctcaagtctgtatacggggacacggacagccttttcgtcaccgagcgtggacaccggctcatggaaaccagaggtaagaaacgcatcaaaaagcatgggggaaacctggtttttgaccccgaacggccagagctcacctggctcgtggaatgcgagaccgtctgcggggcctgcggcgcggatgcctactccccggaatcggtatttctcgcgcccaagctctacgccctcaaaagtctgcactgcccctcgtgcggcgcctcctccaagggcaagctgcgcgccaagggccatgccgcggaggggctggactatgacaccatggtcaaatgctacctggccgacgcgcagggcgaagaccggcagcgcttcagcaccagcaggaccagcctcaagcgcaccctggccagcgcgcagcccggagcgcaccccttcaccgtgacccagactacgctgacgaggaccctgcgcccgtggaaagacatgaccctggcccgtctggacgagcaccgactactgccgtacagcgaaagccgccccaacccgcgaaacgaggagatatgctggatcgagatgccgtag

SEQ ID NO: 746 - DNA, 138 bp, Adenovirus C1
  MISC_FEATURE (1)..(138): C1.orf00056 IVa2 virion morphogenesis-associated protein 51 kDa
atgtccctgacacgcatgttttccctgaccaaatccgctagaaggcgctcgccgcccagcgatagcagttcttgcaaggaagcaaagtttttcaacggtttgaggccgtccgccgtaggcatgcttttgagcgtttga

SEQ ID NO: 747 - DNA, 945 bp, Adenovirus C1
  MISC_FEATURE (1)..(945): C1.orf00057 IVa2 virion morphogenesis-associated protein 51 kDa
atgcgtgtcagggacatgcttaacgaagtggcccccttgctcagggatgacggcagctgcagctctcttaactaccagttgcagccggtaataggtgtgatttacgggcccaccggctgcggtaagtcgcagctgctcaggaacctgctttcttcccagctgatctcccctaccccggaaaccgttttctttattgccccgcaggtagacatgatccccccatctgaactcaaagcgtgggaaatgcaaatctgtgagggtaactacgcccctgggccggatggaaccattataccgcagtctggcaccctccgcccgcgctttgtaaaaatggcctatgacgatctcatcctggaacacaactatgacgttagtgatcccagaaatatcttcgcccaggccgccgcccgtgggcccattgccatcattatggacgaatgcatggaaaatcttggaggtcacaagggcgtctccaagttcttccacgcatttccttctaagctacatgacaaatttcccaagtgcaccggatacactgtgctggtggttctgcacaacatgaatcccaggagggatatggctgggaacatagccaacctaaaaatacagtccaagatgcatctcatatccccacgtatgcacccatcccagcttaaccgctttgtaaacacttacaccaagggcctgcccctggcaatcagcttgcttctaaaggacatttttaggcaccacgcccagcgctcctgctacgactggatcatctacaacaccaccccgcagcatgaagctctgcagtggtgctacctccaccccagagacgggcttatgcccatgtatctgaacatccagagccatctctaccacgtcctggaaaaaatacacaggaccctcaacgaccgagaccgctggtcccgggcctaccgcgcgcgcaaaacccctaaataa

SEQ ID NO: 748 - DNA, 423 bp, Adenovirus C1
  MISC_FEATURE (1)..(423): C1.orf00059 IX hexon-associated protein 14.5 kDa
atgagcaccaactcgtttgatggaagcattgtgagctcatatttgacaacgcgcatgcccccatgggccggggtgcgtcagaatgtgatgggctccagcattgatggtcgccccgtcctgcccgcaaactctactaccttgacctacgagaccgtgtctggaacgccgttggagactgcagcctccgccgccgcttcagccgctgcagccaccgcccgcgggattgtgactgactttgctttcctgagcccgcttgcaagcagtgcagcttcccgttcatccgcccgcgatgacaagttgacggctcttttggcacaattggattctttgacccgggaacttaatgtcgtttctcagcagctgttggagctgcgccagcaggtttctgccctgaaggcttcctcccctcccaatgcggtttaa

SEQ ID NO: 749 - DNA, 1269 bp, Adenovirus C1
  MISC_FEATURE (1)..(1269): C1.orf00061 E1B transformation-associated protein 55 kDa
atgaatgttgtacaggtggctgaactgtttccagaactgagacgcattttaacaattaacgaggatgggcaggggctaaagggggtaaagagggagcggggggcttttgaggctacagaggaggttaggaatttaacttttagcttaatgaccagacaccgtcctgagtgtgttacttttcagcagattaaggataattgcgctaatgagcttgatctgctggcgcagaagtattccatagagcagctgaccacttactggctgcagccaggggatgattttgaggaggctattagggtatatgcaaaggtggcacttaggccagattgcaagtacaagattagcaaacttgtaaatattaggaattgttgctacatttctgggaacggggccgaggtggagatagatacggaggatagggtggcctttagatgtagcatgataaatatgtggccgggggtacttggcatggacggggtggttattatgaatgtgaggtttactggccccaattttagcggtacggttttcctggccaataccaaccttatcctacacggtgtaagcttctatgggtttaacaatacctgcgtggaagcctggaccgatgtaagggttcgaggctgtgccttttactgctgctggaagggggtggtgtgtcgccccaaaagcagggcttcaattaagaaatgcctctttgaaaggtgtaccttgggtatcctgtctgagggtaactccagggtgcgccacaatgtggcctccgactgtggttgcttcatgctagtgaaaagcgtggctgtgattaagcataacatggtgtgtggcaactgcgaggacagggcctctcagatgctaacctgctcggacggcaactgtcacctgctgaagaccattcacgtagccagccactctcgcaaggcctggccagtgtttgagcacaacatactgacccgctgttccttgcatttgggtaacaggaggggggtgttcctaccttaccaatgcaatttgagtcacactaagatattgcttgagcccgaaagcatgtccaaggtgaacctgaacggggtgtttgacatgaccatgaagatctggaaggtgctgaggtacgatgagacccgcaccaggtgcagaccctgcgagtgtggcggtaaacatattaggaaccagcctgtgatgctggatgtgaccgaggagctgaggcccgatcacttggtgctggcctgcacccgcgctgagtttggctctagcgatgaagatacagattga

SEQ ID NO: 750 - DNA, 630 bp, Adenovirus C1
  MISC_FEATURE (1)..(630): C1.orf00062 E1A 21 kDa protein
atgtttaacttgcatggcgtgttaaatggggcggggcttaaagggtatataatgcgccgtgggctaatcttggttacatttgacctcatggaggcttgggagtgtttggaagatttttctgctgtgcgtaacttgctggaacagagctctaacagtacctcctggttttggaggtttctgtggggctcctcccaagcaaagttagtctgcagaattaaggaggattacaagtgggaatttgaagagcttttgaaatcctgtggtgagctgtttgattctttgaatctgggtcaccaggcgcttttccaagagaaggtcatcaagactttggatttttccacaccggggcgcgctgcggctgctgttgcttttttgagttttataaaggataaatggagcgaagaaacccatctgagcggggggtacctgctggattttctggccatgcatttgtggagagcggtggtgagacacaagaatcgcctactactgttgtcttccgtccgcccggcaataataccgacggaggagcagcagcagcaacagcagcagcaggaggaagccaggcggcggcggcggcaggagcagagcccatggaacccgagagccggcctggaccctcgggaatga

SEQ ID NO: 751 - DNA, 312 bp, Adenovirus C1
  MISC_FEATURE (1)..(312): C1.orf00063 E1A 26 kDa protein
gtgtctgaacctgagcctgagcccgagccagaaccggaacctgcaagacctgcccggcgtcctaaaatggtgcctgctatcctgagacgcccgacatcacctgtgtccagagaatgcaatagtagtacggatagctgtgactccggtccttctaacacacctcctgagatacatccggtggtcccgctgtgccccattaaaccagttgccgtgagagttggtgggcgtcgccgggctgtggaatgtatcgaggacttgcttaacgagcctgggcaacctttggacttgagctgtaaacgccccaggccataa

SEQ ID NO: 752 - DNA, 561 bp, Adenovirus C1
  MISC_FEATURE (1)..(561): C1.orf00064 E1A 32 kDa protein
atgagacatattatttgccacggaggtgttattaccgaagaaatggccgccagtcttttggaccagctaatcgaagaggtactggctgataatcttccacctcctagccattttgaaccacctacccttcacgaactgtatgatttagacgtgacggcccccgaagatcccaacgaggaggcggtttcgcagatttttcctgactctgtaatgttggcggcgcaggaagggattgacttactcacttttccgccggcgcccggttctccggagccgcctcacctttcccggcagcccgagcagccggagcagagagccttgggtccggtttctatgccaaaccttgtaccggaggtgatcgatcttacctgccacgaggctggctttccacccagtgacgacgaggatgaagagggtgaggagtttgtgttagattatgtggagcagcccgggcacggttgcaggtcttgtcattatcatcggaggaatacgggggacccagatattatgtgttcgctttgctatatgaggacctgtggcatgtttgtctacagtaagtga

SEQ ID NO: 753 - DNA, 141 bp, Artificial Sequence; identical to SEQ ID NO: 713
  C2.orf00001 hypothetical protein

SEQ ID NO: 754 - DNA, 387 bp, Adenovirus C2; identical to SEQ ID NO: 714
  MISC_FEATURE (1)..(387): C2.orf00002 E4 ORF1 protein

SEQ ID NO: 755 - DNA, 411 bp, Adenovirus C2
  MISC_FEATURE (1)..(411): C2.orf00005 E4 ORF2 protein
atgcaggaacccgcagacatgtttgagagaaaaatggtgtctttttctgtggtggttccggaacttacctgcctttatctgcatgagcatgactacgatgtgcttgcttttttgcgcgaggctttgcctgattttttgagcagcaccttgcattttatatcgccgcccatgcaacaagcttacataggggctacgctggttagcatagctccgagtatgcgtgtcataatcagtgtgggttcttttgtcatggttcctggcggggaagtggccgcgctggtccgtgcagacctgcacgattatgttcagctggccctgcgaagggacctacgggatcgcggtatttttgttaatgttccgcttttgaatcttatacaggtctgtgaggaacctgaatttttgcaatcatga

SEQ ID NO: 756 - DNA, 351 bp, Adenovirus C2
  MISC_FEATURE (1)..(351): C2.orf00006 E4 ORF3 protein
atgattcgctgcttgaggctgaaggtggagggcgctctggagcagatttttacaatggccggacttaatattcgggatttgcttagagacatattgataaggtggcgagatgaaaattatttgggcatggttgaaggtgctggaatgtttatagaggagattcaccctgaagggtttagcctttacgtccacttggacgtgagggcagtttgccttttggaagccattgtgcaacatcttacaaatgccattatctgttctttggctgtagagtttgaccacgccaccggaggggagcgcgttcacttaatagatcttcattttgaggttttggataatcttttggaataa

SEQ ID NO: 757 - DNA, 885 bp, Adenovirus C2
  MISC_FEATURE (1)..(885): C2.orf00009 E4 34K E4 34K protein
atgactacgtccggcgttccatttggcatgacactacgaccaacacgatctcggttgtctcggcgcactccgtacagtagggatcgcctacctccttttgagacagagacccgcgctaccatactggaggatcatccgctgctgcccgaatgtaacactttgacaatgcacaacgtgagttacgtgcgaggtcttccctgcagtgtgggatttacgctgattcaggaatgggttgttccctgggatatggttctgacgcgggaggagcttgtaatcctgaggaagtgtatgcacgtgtgcctgtgttgtgccaacattgatatcatgacgagcatgatgatccatggttacgagtcctgggctctccactgtcattgttccagtcccggttccctgcagtgcatagccggcgggcaggttttggccagctggtttaggatggtggtggatggcgccatgtttaatcagaggtttatatggtaccgggaggtggtgaattacaacatgccaaaagaggtaatgtttatgtccagcgtgtttatgaggggtcgccacttaatctacctgcgcttgtggtatgatggccacgtgggttctgtggtccccgccatgagctttggatacagcgccttgcactgtgggattttgaacaatattgtggtgctgtgctgcagttactgtgctgatttaagtgagatcagggtgcgctgctgtgcccggaggacaaggcgtctcatgctgcgggcggtgcgaatcatcgctgaggagaccactgccatgttgtattcctgcaggacggagcggcggcggcagcagtttattcgcgcgctgctgcagcaccaccgccctatcctgatgcacgattatgactctacccccatgtag

SEQ ID NO: 758 - DNA, 201 bp, Adenovirus C2
  MISC_FEATURE (1)..(201): C2.orf00010 E4 ORF6/7 protein
atgaacttaagcgagctgcccggggagtttattaatatcactgatgagcgtttggctcgacaggaaaccgtgtggaatataacacctaagaatatgtctgttacccatgatatgatgctttttaaggccagccggggagaaaggactgtgtactctgtgtgttgggagggaggtggcaggttgaatactagggttctgtga

SEQ ID NO: 759 - DNA, 168 bp, Adenovirus C2
  MISC_FEATURE (1)..(168): C2.orf00011 U protein
atgaagatagtgggtgcggagggacaagaacatgaggaatttgacatcccatttaaactttggagaaagtttgcagctaaaaggcggctgagataccagagttgggaggaaggaaaggaggtgatgctgaataagctggacaaagatttgctgactgattttaagtaa

SEQ ID NO: 760 - DNA, 1749 bp, Adenovirus C2; identical to SEQ ID NO: 143
  MISC_FEATURE (1)..(1749): C2.orf00012 L5 fiber

SEQ ID NO: 761 - DNA, 387 bp, Adenovirus C2
  MISC_FEATURE (1)..(387): C2.orf00014 E3 control protein 14.7 kDa
atgactgaatctctagatctagaattggatggaattaacaccgaacagcgcctactagaaaggcgcaaggcggcgtccgagcgagaacgcctaaaacaagaagttgaagacatggttaacctacaccagtgtaaaagaggtatcttttgtgtggtcaagcaggccaaacttacctacgaaaaaaccactaccggcaaccgcctcagctacaagctacccacccagcgccaaaaactggtgcttatggtgggagaaaaacctatcaccgtcacccagcactcggcagaaacagagggctgcctgcacttcccctatcagggtccagaggacctctgcactcttattaaaaccatgtgtggtattagagatcttattccattcaactaa

SEQ ID NO: 762 - DNA, 393 bp, Adenovirus C2
  MISC_FEATURE (1)..(393): C2.orf00016 E3 RID-beta
atgaaacggagtgtcatttttgttttgctgattttttgcgccctacctgtgctttgctcccaaacctcagcgcctcccaaaagacatatttcctgcagattcactcaaatatggaacattcccagctgctacaacaaacagagcgatttgtcagaagcctggttatacgccatcatctctgtcatggttttttgcagtaccatttttgccctagccatatatccataccttgacattggctggaatgccatagatgccatgaaccaccctactttcccagtgcccgctgtcataccactgcaacaggttattgccccaatcaatcagcctcgccccccttctcccacccccactgagattagctactttaatttgacaggtggagatgactga

SEQ ID NO: 763 - DNA, 207 bp, Adenovirus C2
  MISC_FEATURE (1)..(207): C2.orf00017 E3 RID-alpha
atggtgcctgaggtacgcaatgcgcacacaaacccagtcaatgaactgaatgaaggcgatgactacagtgacgaggctgcagatgaggataagggtgacaaatccgtaaagcaggtaaactgtgaaaggtgggatgcaatctacttcgatgtgagcgaccgcggccaatgtagagcacgcacagaaaagcgcaacaagggtcaataa

SEQ ID NO: 764 - DNA, 162 bp, Adenovirus C2
  MISC_FEATURE (1)..(162): C2.orf00018 E3 CR1-beta
atgtttgtttgccttattattatgtggcttatttgttgcctaaagcgcagacgcgccagaccccccatctataggcctatcattgtgctcaacccacacaatgaaaaaattcatagattggacggtctgaaaccatgttctcttcttttacagtatgattaa

SEQ ID NO: 765 - DNA, 471 bp, Adenovirus C2
  MISC_FEATURE (1)..(471): C2.orf00020 19K protein
atgattttaggcttgctcgcccttgcggcagtctgcagcgctgccaaaaaggttgagtttaaggaaccagcttgcaatgttacatttaaatcagaagctaatgaatgcactactcttataaaatgcaccacagaacatgaaaagcttattattcgccacaaagacaaaattggcaagtatgctgtatatgctatttggcagccaggtgacactaacgactataatgtcacagtcttccaaggtgaaaatcgtaaaacttttatgtataaatttccattttatgaaatgtgcgatattaccatgtacatgagcaaacagtacaagttgtggcccccacaaaagtgtttagagaacactggcaccttttgttccaccgctctgcttattacagcgcttgctttggtatgtaccttactttatctcaaatacaaaagcagacgcagttttattgatgaaaagaaaatgccttga

SEQ ID NO: 766 - DNA, 120 bp, Adenovirus C2
  MISC_FEATURE (1)..(120): C2.orf00023 E3 CR1-alpha1
atgggagtaatgtctggttacgctcaggctgtaggtgtgggcgcagcaaccggtgacgcactcgtacgttcccggcaggtgaggagggtggtggtggtggtgtttttcttgacggtgtag

SEQ ID NO: 767 - DNA, 324 bp, Adenovirus C2
  MISC_FEATURE (1)..(324): C2.orf00025 E3 12.5 kDa immune modulating protein
atgaccagtggagaggcagagcgactgcgcctgacacacctcgaccactgccgccgccacaagtgctttgcccgcggctccggtgagttttgttactttgaattgcccgaagagcatatcgagggcccggcgcacggcgtccggctcaccacccaggtagagcttacacgtagcctgattcgggagtttaccaagcgccccctgctagtggagcgggagcggggtccctgtgttctgaccgtggtttgcaactgtcctaaccctggattacatcaagatctttgttgtcatctctgtgctgagtataataaatacagaaattag

SEQ ID NO: 768 - DNA, 171 bp, Adenovirus C2
  MISC_FEATURE (1)..(171): C2.orf00029 L4 encapsidation protein
atgacggtagtaatgcaggatgttacgggggaaggccacgccgtgatggtagagaagaaagcggcgggcgaaggagatgttgcccccacagtcttgcaagcaagcaactatggcgttcttgtgcccgcgccacgagcggtagccttggcgctgttgttgctcttgggctaa

SEQ ID NO: 769 - DNA, 2418 bp, Adenovirus C2
  MISC_FEATURE (1)..(2418): C2.orf00032 L4 hexon-assembly protein
atggagtcagtcgagaaggaggacagcctaaccgccccctttgagttcgccaccaccgcctccaccgatgccgccaacgcgcctaccaccttccccgtcgaggcacccccgcttgaggaggaggaagtgattatcgagcaggacccaggttttgtaagcgaagacgacgaggatcgctcagtaccaacagaggataaaaagcaagaccaggacgacgcagaggcaaacgaggaacaagtcgggcggggggaccaaaggcatggcgactacctagatgtgggagacgacgtgctgttgaagcatctgcagcgccagtgcgccattatctgcgacgcgttgcaagagcgcagcgatgtgcccctcgccatagcggatgtcagccttgcctacgaacgccacctgttctcaccgcgcgtaccccccaaacgccaagaaaacggcacatgcgagcccaacccgcgcctcaacttctaccccgtatttgccgtgccagaggtgcttgccacctatcacatctttttccaaaactgcaagatacccctatcctgccgtgccaaccgcagccgagcggacaagcagctggccttgcggcagggcgctgtcatacctgatatcgcctcgctcgacgaagtgccaaaaatctttgagggtcttggacgcgacgagaaacgcgcggcaaacgctctgcaacaagaaaacagcgaaaatgaaagtcactgtggagtgctggtggaacttgagggtgacaacgcgcgcctagccgtgctgaaacgcagcatcgaggtcacccactttgcctacccggcacttaacctaccccccaaggttatgagcacagtcatgagcgagctgatcgtgcgccgtgcacgacccctggagagggatgcaaacttgcaagaacaaaccgaggagggcctacccgcagttggcgatgagcagctggcgcgctggcttgagacgcgcgagcctgccgacttggaggagcgacgcaagctaatgatggccgcagtgcttgttaccgtggagcttgagtgcatgcagcggttctttgctgacccggagatgcagcgcaagctagaggaaacgttgcactacacctttcgccagggctacgtgcgccaggcctgcaaaatttccaacgtggagctctgcaacctggtctcctaccttggaattttgcacgaaaaccgcctcgggcaaaacgtgcttcattccacgctcaagggcgaggcgcgccgcgactacgtccgcgactgcgtttacttatttctgtgctacacctggcaaacggccatgggcgtgtggcagcaatgcctggaggagcgcaacctaaaggagctgcagaagctgctaaagcaaaacttgaaggacctatggacggccttcaacgagcgctccgtggccgcgcacctggcggacattatcttccccgaacgcctgcttaaaaccctgcaacagggtctgccagacttcaccagtcaaagcatgttgcaaaactttaggaactttatcctagagcgttcaggaattctgcccgccacctgctgtgcgcttcctagcgactttgtgcccattaagtaccgtgaatgccctccgccgctttggggtcactgctaccttctgcagctagccaactaccttgcctaccactccgacatcatggaagacgtgagcggtgacggcctactggagtgtcactgtcgctgcaacctatgcaccccgcaccgctccctggtctgcaattcgcaactgcttagcgaaagtcaaattatcggtacctttgagctgcagggtccctcgcctgacgaaaagtccgcggctccggggttgaaactcactccggggctgtggacgtcggcttaccttcgcaaatttgtacctgaggactaccacgcccacgagattaggttctacgaagaccaatcccgcccgccaaatgcggagcttaccgcctgcgtcattacccagggccacatccttggccaattgcaagccatcaacaaagcccgccaagagtttctgctacgaaagggacggggggtttacctggacccccagtccggcgaggagctcaacccaatccccccgccgccgcagccctatcagcagccgcgggcccttgcttcccaggatggcacccaaaaagaagctgcagctgccgccgccgccacccacggacgaggaggaatactgggacagtcaggcagaggaggttttggacgaggaggaggagatgatggaagactgggacagcctagacgaagcttccgaggccgaagaggtgtcagacgaaacaccgtcaccctcggtcgcattcccctcgccggcgccccagaaattggcaaccgttcccagcatcgctacaacctccgctcctcaggcgccgccggcactgcctgttcgccgacccaaccgtag

SEQ ID NO: 770 - DNA, 1590 bp, Adenovirus C2
  MISC_FEATURE (1)..(1590): C2.orf00033 E2A ssDNA-binding protein
atggccagtcgggaagaggagcagcgcgaaaccacccccgagcgcggacgcggtgcggcgcgacgtccaccaaccatggaggacgtgtcgtccccgtcgccgtcgccgccgcctccccgcgcgcccccaaaaaagcggctgaggcggcgtctcgagtccgaggacgaagaagactcgtcacaagatgcgctggtgccgcgcacacccagcccgcggccatcgacctcgacggcggatttggccattgcgtccaaaaagaaaaagaagcgcccctctcccaagcccgagcgcccgccatccccagaggtgatcgtggacagcgaggaagaaagagaagatgtggcgctacaaatggtgggtttcagcaacccaccggtgctaatcaagcacggcaagggaggtaagcgcacggtgcggcggctgaatgaagacgacccagtggcgcggggtatgcggacgcaagaggaaaaggaagagtccagtgaagcggaaagtgaaagcacggtgataaacccgctgagcctgccgatcgtgtctgcgtgggagaagggcatggaggctgcgcgcgcgttgatggacaagtaccacgtggataacgatctaaaggcaaacttcaagctactgcctgaccaagtggaagctctggcggccgtatgcaagacctggctaaacgaggagcaccgcgggttgcagctgaccttcaccagcaacaagacctttgtgacgatgatggggcgattcctgcaggcgtacctgcagtcgtttgcagaggtaacctacaagcaccacgagcccacgggctgcgcgttgtggctgcaccgctgcgctgagatcgaaggcgagcttaagtgtctacacgggagcattatgataaataaggagcacgtgattgaaatggatgtgacgagcgaaaacgggcagcgcgcgctgaaggagcagtctagcaaggccaagatcgtgaagaaccggtggggccgaaatgtggtgcagatctccaacaccgacgcaaggtgctgcgtgcatgacgcggcctgtccggccaatcagttttccggcaagtcttgcggcatgttcttctctgaaggcgcaaaggctcaggtggcttttaagcagatcaaggctttcatgcaggcgctgtatcctaacgcccagaccgggcacggtcaccttctgatgccactacggtgcgagtgcaactcaaagcctgggcatgcaccctttttgggaaggcagctaccaaagttgactccgttcgccctgagcaacgcggaggacctggacgcggatctgatctccgacaagagcgtgctggccagcgtgcaccacccggcgctgatagtgttccagtgctgcaaccctgtgtatcgcaactcgcgcgcgcagggcggaggccccaactgcgacttcaagatatcggcgcccgacctgctaaacgcgttggtgatggtgcgcagcctgtggagtgaaaacttcaccgagctgccgcggatggttgtgcctgagtttaagtggagcactaaacaccagtatcgcaacgtgtccctgccagtggcgcatagcgatgcgcggcagaacccctttgatttttaa

SEQ ID NO: 771 - DNA, 615 bp, Adenovirus C2
  MISC_FEATURE (1)..(615): C2.orf00035 L3 protease
atgggctccagtgagcaggaactgaaagccattgtcaaagatcttggttgtgggccatattttttgggcacctatgacaagcgctttccaggctttgtttctccacacaagctcgcctgcgccatagtcaatacggccggtcgcgagactgggggcgtacactggatggcctttgcctggaacccgcgctcaaaaacatgctacctctttgagccctttggcttttctgaccaacgactcaagcaggtttaccagtttgagtacgagtcactcctgcgccgtagcgccattgcttcttcccccgaccgctgtataacgctggaaaagtccacccaaagcgtgcaggggcccaactcggccgcctgtggactattctgctgcatgtttctccacgcctttgccaactggccccaaactcccatggatcacaaccccaccatgaaccttattaccggggtacccaactccatgcttaacagtccccaggtacagcccaccctgcgtcgcaaccaggaacagctctacagcttcctggagcgccactcgccctacttccgcagccacagtgcgcagattaggagcgccacttctttttgtcacttgaaaaacatgtaa

SEQ ID NO: 772 - DNA, 2907 bp, Adenovirus C2; identical to SEQ ID NO: 203
  MISC_FEATURE (1)..(2907): C2.orf00041 L3 hexon

SEQ ID NO: 773 - DNA, 753 bp, Adenovirus C2
  MISC_FEATURE (1)..(753): C2.orf00043 L3 VI capsid protein
atggaagacatcaactttgcgtctctggccccgcgacacggctcgcgcccgttcatgggaaactggcaagatatcggcaccagcaatatgagcggtggcgccttcagctggggctcgctgtggagcggcattaaaaatttcggttccaccattaagaactatggcagcaaggcctggaacagcagcacaggccagatgctgagggacaagttgaaagagcaaaatttccaacaaaaggtggtagatggcctggcctctggcattagcggggtggtggacctggccaaccaggcagtgcaaaataagattaacagtaagcttgatccccgccctcccgtagaggagcctccaccggccgtggagacagtgtctccagaggggcgtggcgaaaagcgtccgcggcccgacagggaagaaactctggtgacgcaaatagatgagcctccctcgtacgaggaggcactaaagcaaggcctgcccaccacccgtcccatcgcgcccatggctaccggagtgctgggccagcacacacctgtaacgctggacctgcctccccccgctgacacccagcagaaacctgtgctgccagggccgtccgccgttgttgtaacccgccctagccgcgcgtccctgcgccgtgccgccagcggtccgcgatcgatgcggcccgtagccagtggcaactggcaaagcacactgaacagcatcgtgggtctgggggtgcaatccctgaagcgccgacgatgcttctaa

SEQ ID NO: 774 - DNA, 243 bp, Adenovirus C2; identical to SEQ ID NO: 736
  MISC_FEATURE (1)..(243): C2.orf00046 L2 X core protein

SEQ ID NO: 775 - DNA, 1107 bp, Adenovirus C2
  MISC_FEATURE (1)..(1107): C2.orf00048 L2 V core protein
atgtccaagcgcaaaatcaaagaagagatgctccaggtcatcgcgccggagatctatggccccccgaagaaggaagagcaggattacaagccccgaaagctaaagcgggtcaaaaagaaaaagaaagatgatgatgatgaacttgacgacgaggtggaactgctgcacgcaaccgcgcccaggcggcgggtacagtggaaaggtcgacgcgtaagacgtgttttgcgacccggcaccaccgtagtttttacgcccggtgagcgctccacccgcacctacaagcgcgtgtatgatgaggtgtacggcgacgaggacctgcttgagcaggccaacgagcgcctcggggagtttgcctacggaaagcggcataaggacatgttggcgttgccgctggacgagggcaacccaacacctagcctaaagcccgtgacactgcagcaggtgctgcccacgcttgcaccgtccgaagaaaagcgcggcctaaagcgcgagtctggtgacttggcacccaccgtgcagctgatggtacccaagcgccagcgactggaagatgtcttggaaaaaatgaccgtggagcctgggctggagcccgaggtccgcgtgcggccaatcaagcaggtggcaccgggactgggcgtgcagaccgtggacgttcagatacccaccaccagtagcactagtattgccactgccacagagggcatggagacacaaacgtccccggttgcctcggcggtggcagatgccgcggtgcaggcggccgctgcggccgcgtccaaaacctctacggaggtgcaaacggacccgtggatgtttcgcgtttcagccccccggcgcccgcgccgttccaggaagtacggcaccgccagcgcactactgcccgaatatgccctacatccttccatcgcgcctacccccggctatcgtggctacacctaccgccccagaagacgagcgactacccgacgccgaaccaccactggaacccgccgccgccgtcgccgtcgccagcccgtgctggccccgatttccgtgcgcagggtggctcgcgaaggaggcaggaccctggtgctgccaacagcgcgctaccaccccagcatcgtttaa

SEQ ID NO: 776 - DNA, 597 bp, Adenovirus C2
  MISC_FEATURE (1)..(597): C2.orf00049 L2 VII core protein
atgtccatccttatatcgcccagcaataacacaggctggggcctgcgcttcccaagcaagatgtttggcggggcaaagaagcgctccgaccaacacccagtgcgcgtgcgcgggcactaccgcgcgccctggggcgcgcacaaacgcggccgcactgggcgcaccaccgtcgatgacgccattgacgcggtggtggaggaggcgcgcaactacacgcccacgccgccaccagtgtccacagtggacgcggccattcagaccgtggtgcgcggagcccggcgttatgctaaaatgaagagacggcggaggcgcgtagcacgtcgccaccgccgccgacccggcactgccgcccaacgcgcggcggcggccctgcttaaccgcgcacgtcgcaccggccgacgggcggccatgcgggccgctcgaaggctggccgcgggtattgtcactgtgccccccaggtccaggcgacgagcggccgccgcagcagccgcggccattagtgctatgactcagggtcgcaggggcaacgtgtactgggtgcgcgactcggttagcggcctgcgcgtgcccgtgcgcacccgccccccgcgcaactag

SEQ ID NO: 777 - DNA, 1716 bp, Adenovirus C2; identical to SEQ ID NO: 175
  MISC_FEATURE (1)..(1716): C2.orf00052 L2 penton

SEQ ID NO: 778 - DNA, 1758 bp, Adenovirus C2
  MISC_FEATURE (1)..(1758): C2.orf00057 L1 IIIa capsid protein
atgatgcaagacgcaacggacccggcggtgcgggcggcgctgcagagccagccgtccggccttaactccacggacgactggcgccaggtcatggaccgcatcatgtcgctgactgcgcgtaaccctgacgcgttccggcagcagccgcaggccaaccggctctccgcaattctggaagcggtggtcccggcgcgcgcaaaccccacgcacgagaaggtgctggcgatcgtaaacgcgctggccgaaaacagggccatccggcccgatgaggccggcctggtctacgacgcgctgcttcagcgcgtggctcgttacaacagcggcaacgtgcagaccaacctggaccggctggtgggggatgtgcgcgaggccgtggcgcagcgtgagcgcgcgcagcagcagggcaacctgggctccatggttgcactaaacgccttcctgagtacacagcccgccaacgtgccgcggggacaggaggactacaccaactttgtgagcgcactgcggctaatggtgactgagacaccgcaaagtgaggtgtaccagtccgggccagactattttttccagaccagtagacaaggcctgcagaccgtaaacctgagccaggctttcaagaacttgcaggggctgtggggggtgcgggctcccacaggcgaccgcgcgaccgtgtctagcttgctgacgcccaactcgcgcctgttgctgctgctaatagcgcccttcacggacagtggcagcgtgtcccgggacacatacctaggtcacttgctgacactgtaccgcgaggccataggtcaggcgcatgtggacgagcatactttccaggagattacaagtgtcagccgcgcgctggggcaggaggacacgggcagcctggaggcaaccctgaactacctgctgaccaaccggcggcagaagatcccctcgttgcacagtttaaacagcgaggaggagcgcatcttgcgctatgtgcagcagagcgtgagccttaacctgatgcgcgacggggtaacgcccagcgtggcgctggacatgaccgcgcgcaacatggaaccgggcatgtatgcctcaaaccggccgtttatcaatcgcctaatggactacttgcatcgcgcggccgccgtgaaccccgagtatttcaccaatgccatcttgaacccgcactggctaccgccccctggtttctacaccgggggatttgaggtgcccgagggtaacgatggattcctctgggacgacatagacgacagcgtgttttccccgcaaccgcagaccctgctagagttgcaacagcgcgagcaggcagaggcggcgctgcgaaaggaaagcttccgcaggccaagcagcttgtccgatctaggcgctgcggccccgcggtcagatgcgagtagcccatttccaagcttgatagggtcttttaccagcactcgcaccacccgcccgcgcctgctgggcgaggaggagtacctaaacaactcgctgctgcagccgcagcgcgaaaagaacctgcctccggcatttcccaacaacgggatagagagcctagtggacaagatgagtagatggaagacgtatgcgcaggagcacagggatgtgcccggcccgcgcccgcccacccgtcgtcaaaggcacgaccgtcagcggggtctggtgtgggaggacgatgactcggcagacgacagcagcgtcctggatttgggagggagtggcaacccgtttgcgcaccttcgccccaggctggggagaatgttttaa

SEQ ID NO: 779 - DNA, 1248 bp, Adenovirus C2
  MISC_FEATURE (1)..(1248): C2.orf00059 L1 52 kDa protein
atgcatccggtgctgcggcagatgcgcccccctcctcagcagcggcaagagcaagagcagcggcagacatgcagggcaccctccccttctcctaccgcgtcaggaggggcaacatccgcggctgacgcggcggcagatggtgattacgaacccccgcggcgccgggcccggcactacctggacttggaggagggcgagggcctggcgcggctaggagcgccctctcctgagcgacacccaagggtgcagctgaagcgtgacacgcgcgaggcgtacgtgccgcggcagaacctgtttcgcgaccgcgagggagaggagcccgaggagatgcgggatcgaaagttccacgcagggcgcgagttgcggcatggcctgaaccgcgagcggttgctgcgcgaggaggactttgagcccgacgcgcggaccgggattagtcccgcgcgcgcacacgtggcggccgccgacctggtaaccgcgtacgagcagacggtgaaccaggagattaactttcaaaaaagctttaacaaccacgtgcgcacgcttgtggcgcgcgaggaggtggctataggactgatgcatctgtgggactttgtaagcgcgctggagcaaaacccaaatagcaagccgctcatggcgcagctgttccttatagtgcagcacagcagggacaacgaggcattcagggatgcgctgctaaacatagtagagcccgagggccgctggctgctcgatttgataaacattctgcagagcatagtggtgcaggagcgcagcttgagcctggctgacaaggtggccgccattaactattccatgctcagtctgggcaagttttacgcccgcaagatataccataccccttacgttcccatagacaaggaggtaaagatcgaggggttctacatgcgcatggcgttgaaggtgcttaccttgagcgacgacctgggcgtttatcgcaacgagcgcatccacaaggccgtgagcgtgagccggcggcgcgagctcagcgaccgcgagctgatgcacagcctgcaaagggccctggctggcacgggcagcggcgatagagaggccgagtcctactttgacgcgggcgctgacctgcgctgggccccaagccgacgcgccctggaggcagctggggccggacctgggctggcggtggcacccgcgcgcgctggcaacgtcggcggcgtggaggaatatgacgaggacgatgagtacgagccagaggacggcgagtactaa

SEQ ID NO: 780 - DNA, 414 bp, Adenovirus C2
  MISC_FEATURE (1)..(414): C2.orf00063 E2B DNA terminal protein
atgatatccgtagatgtacctggacatccaggtgatgccggcggcggtggtggaggcgcgcggaaagtcgcggacgcggttccagatgttgcgcagcggcaaaaagtgctccatggtcgggacgctctggccggtgaggcgtgcgcagtcgttgacgctctagaccgtgcaaaaggagagcctgtaagcgggcactcttccgtggtctggtggataaattcgcaagggtatcatggcggacgaccggggttcgaaccccggatccggccgtccgccgtgatccatgcggttaccgcccgcgtgtcgaacccaggtgtgcgacgtcagacaacgggggagcgctccttttggcttccttccaggcgcggcggctgctgcgctagcttttttggccactggccgcgcgcggcgtaa

SEQ ID NO: 781 - DNA, 1842 bp, Adenovirus C2
  MISC_FEATURE (1)..(1842): C2.orf00065 pTP
atgttggaagacctcgcccccggagccccggccaccctacgctggcccctctaccgccagccgccgccgcactttttggtgggatatcagtacctggtgcggacttgcaacgactacgtctttgactcaagggcttactcgcgtctcaggtacaccgagctctcgcagccgggtcaccagaccgttaactggtccgttatggccaactgcacttacaccatcaacacgggcgcataccaccgctttgtggacatggatgacttccagtctaccctcacgcaggtgcagcaggccatattagccgagcgcgttgtcgccgacctggccctgcttcagccgatgaggggcttcggggtcacacgcatgggaggaagagggcgccacctacggccaaactccgccgccgccgtagcgatagatgcaagagatgcaggacaagaggaaggagaagaagaagtgccggtagaaaggctcatgcaagactactacaaagacctgcgccgatgtcaaaacgaagcctggggcatggccgaccgcctgcgcattcagcaggccggacccaaggacatggtgcttctgtcgaccatccgccgtctcaagaccgcctactttaattacatcatcagcagcacctccgccagaaacaaccccgaccgccacccgctgccgcccgccacggtgctcagcctaccttgcgactgtgactggttagacgcctttctcgagaggttttccgatccggtcgatgcggactcgctcaggtccctcggtggcggagtacctacacaacaattgttgagatgcatcgttagcgccgtatccctgccgcacggcagccccccgccaacccataaccgggacatgacgggcggcgtcttccaactgcgcccccgcgagaacggccgcgccgtcaccgagaccatgcgccgtcgccgcggggagatgatcgagcgctttgtcgaccgcctcccggtgcgccgtcgtcgccgccgtgtcccccctcccccaccgccgccagaagaagaagaagaaggggaggcccttatggaagaggagattgaagaagaagaggcccctgtagcctttgagcgcgaggtgcgcgacactgtcgccgagctcatccgtcttctggaggaggagttaaccgtgtcggcgcgcaactcccagtttttcaacttcgccgtggacttctacgaggccatggagcgccttgaggccttgggggatatcaacgaatccacgttgcgacgctgggttatgtacttcttcgtggcagaacacaccgccaccaccctcaactacctctttcagcgcctgcgaaactacgccgtcttcgcccggcacgtggagctcaatctcgcgcaggtggtcatgcgcgcccgcgatgccgaagggggcgtggtctacagccgcgtctggaacgagggaggcctcaacgccttctcgcagctcatggcccgcatctccaacgacctcgccgccaccgtggagcgagccggacgcggagatctccaggaggaagagatcgagcagttcatggccgaaatcgcctatcaagacaactcaggagacgtgcaggagattttgcgccaggccgccgtcaacgacaccgaaattgattctgtcgaactctctttcaggttcaagctcaccgggcccgtcgtcttcacgcagaggcgccagattcaggagatcaaccgccgcgtcgtcgcgttcgccagcaacctccgcgcgcagcaccagctcctgcccgcgcgcggcgccgacgtgcccctgccccctctcccggcgggtcccgagccccccctacctccgggggcccgcccgcgtcaccgcttttag

SEQ ID NO: 782 - DNA, 3309 bp, Adenovirus C2
  MISC_FEATURE (1)..(3309): C2.orf00067 E2B DNA polymerase
ttgcaagtcatcgacgccgccaccaaccagcccctggaaatcaggtatcacctggacctagcccgcgccctgacccggctatgcgaggtaaacctgcaggagctcccgcctgacctgtcgccgcgggagctccagaccatggacagctcccatctgcgcgatgttgtcatcaagctccgaccgccgcgcgcggacatctggactttgggctcgcgcggcgtggtggtccgatccaccataactcccctcgagcagccagacggtcaaggacaagcagccgaagtagaagaccaccagccaaacccgccaggcgaggggctcaaattcccactctgcttccttgtgcgcggtcgtcaggtcaacctcgtgcaggatgtacagcccgtgcaccgctgccagtactgcgcacgtttttacaaaagccagcacgagtgttcggcccgtcgcagggacttctactttcaccacatcaacagccactcctccaactggtggcgggagatccagttcttcccgatcggctcgcatcctcgcaccgagcgtctctttgtcacctacgatgtagagacctatacttggatgggggcctttgggaagcagctcgtgcccttcatgctggttatgaagttcggcggagatgagcctctggtgaccgccgcgcgagacctagccgtggaccttggatgggaccgctgggaacaagacccgcttaccttctactgcatcaccccagaaaaaatggccataggtcgccagtttaggacctttcgcgaccacctgcaaatgctaatggcccgtgacctgtggagctcattcgtcgcttccaaccctcatcttgcagactgggccctgtcagaacacgggctcagctcccctgaggagctcacctacgaggaacttaaaaaattgccctccatcaagggcaccccgcgcttcttggaactttacatcgtgggccacaacatcaacggcttcgacgagatcgtgctcgccgcccaggtaattaacaaccgttccgaggtgccgggacccttccgcatcacacgcaactttatgcctcgcgcgggaaagatacttttcaacgatgtcaccttcgccctgccaaacccgcgttccaaaaagcgcacggactttttgctctgggagcagggcggatgcgacgacactgacttcaaataccagtacctcaaagtcatggttagggacacctttgcgctcacccacacctcgctccggaaggccgcgcaggcatacgcgctacccgtagaaaagggatgctgcgcctaccaggccgtcaaccagttctacatgctaggctcttaccgttcggaggccgacgggtttccgatccaagagtactggaaagaccgcgaagagtttgtcctcaaccgcgagctgtggaaaaaaaagggacaggataagtatgacatcatcaaggaaaccctggactactgcgccctagacgtgcaggtcaccgccgagctggtcaacaagctgcgcgactcctacgcctccttcgtgcgtgacgcggtaggtctcacagacgccagcttcaacgtcttccagcgtccaaccatatcatccaactcacatgccatcttcaggcagatagtcttccgagcagagcagcccgcccgtagcaacctcggtcccgacctcctcgctccctcgcacgaactatacgattacgtgcgcgccagcatccgcggtggaagatgctaccctacatatcttggaatactcagagagcccctctacgtttacgacatttgcggcatgtacgcctccgcgctcacccaccccatgccatggggtcccccactcaacccatacgagcgcgcgcttgccgcccgcgcatggcagcaggcgctagacttgcaaggatgcaagatagactacttcgacgcgcgcctgctgcccggggtctttaccgtggacgcagaccccccggacgagacgcagctagacccactaccgccattctgttcgcgcaagggcggccgcctctgctggaccaacgagcgcctacgcggagaggtagccaccagcgttgaccttgtcaccctgcacaaccgcggttggcgcgtgcacctggtgcccgacgagcgcaccaccgtctttcccgaatggcggtgcgttgcgcgcgaatacgtgcagctaaacatcgcggccaaggagcgcgccgatcgcgacaaaaaccaaaccctgcgctccatcgccaagttgctgtccaacgccctctacgggtcgtttgccaccaagcttgacaacaaaaagattgtcttttctgaccagatggacgcggccaccctcaaaggcatcaccgcgggccaggtgaatatcaaatcctcctcgtttttggaaactgacaatcttagcgcagaagtcatgcccgcttttgagagggagtactcaccccaacagctggccctcgcagacagcgatgcggaagagagtgaggacgaacgcgcccccacccccttttatagccccccttcaggaacacccggtcacgtggcctacacctataaaccaatcaccttccttgatgccgaagagggcgacatgtgtcttcacaccctggagcgagtggaccccctagtggacaacgaccgctacccctcccacttagcctccttcgtgctggcctggacgcgagccttcgtctcagagtggtccgagtttctatacgaggaggaccgcggaacaccgctcgaggacaggcctctcaagtctgtatacggggacacggacagccttttcgtcaccgagcgtggacaccggctcatggaaaccagaggtaagaaacgcatcaaaaagcatgggggaaacctggtttttgaccccgaacggccagagctcacctggctcgtggaatgcgagaccgtctgcggggcctgcggcgcggatgcctactccccggaatcggtatttctcgcgcccaagctctacgcccttaaaagtctgcactgcccctcgtgcggcgcctcctccaagggcaagctgcgcgccaagggccacgccgcggaggggctggactatgacaccatggtcaaatgctacctggccgacgcgcagggcgaagaccggcagcgcttcagcaccagcaggaccagcctcaagcgcaccctggccagcgcgcagcccggagcgcaccccttcaccgtgacccagactacgctgacgaggaccctgcgcccgtggaaagacatgaccctggcccgtctggacgagcaccgactactgccgtacagcgaaagccgccccaacccgcgaaacgaggagatatgctggatcgagatgccgtag

SEQ ID NO: 783 - DNA, 1128 bp, Adenovirus C2
  MISC_FEATURE (1)..(1128): C2.orf00069 IVa2 pIVa2
atgctggatcgagatgccgtagagcacgtgaccgagctgtgggaccgcctggaactgcttggtcaaacgctcaaaagcatgcctacggcggacggcctcaaaccgttgaaaaactttgcttccttgcaagaactgctatcgctgggcggcgagcgccttctggcggatttggtcagggaaaacatgcaagtcagggacatgcttaacgaagtggcccccctgctcagggatgacggcagctgcagctctcttaactaccagttgcagccggtaataggtgtgatttacgggcccaccggctgcggtaagtcgcagctgctcaggaacctgctttcttcccagctgatctcccctaccccggaaacggttttcttcatcgccccgcaggtagacatgatccccccatctgaactcaaagcgtgggaaatgcaaatctgtgagggtaactacgcccctgggccggatggaaccattataccgcagtctggcaccctccgcccgcgctttgtaaaaatggcctatgacgatctcatcctggaacacaactatgacgttagtgatcccagaaatatcttcgcccaggccgccgcccgtgggcccattgccatcattatggacgaatgcatggaaaatcttggaggtcacaagggcgtctccaagttcttccacgcatttccttctaagctacatgacaaatttcccaagtgcaccggatacactgtgctggtggttctgcacaacatgaatccccggagggatatggctgggaacatagccaacctaaaaatacagtccaagatgcatctcatatccccacgtatgcacccatcccagcttaaccgctttgtaaacacttacaccaagggcctgcccctggcaatcagcttgctactgaaagacatttttaggcaccacgcccagcgctcctgctacgactggatcatctacaacaccaccccgcagcatgaagctctgcagtggtgctacctccaccccagagacgggcttatgcccatgtatctgaacatccagagtcacctttaccacgtcctggaaaaaatacacaggaccctcaacgaccgagaccgctggtcccgggcctaccgcgcgcgcaaaacccctaaataa

SEQ ID NO: 784 - DNA, 423 bp, Adenovirus C2
  MISC_FEATURE (1)..(423): C2.orf00071 pIX
atgagcgccaactcgtttgatggaagcattgtgagctcatatttgacaacgcgcatgcccccatgggccggggtgcgtcagaatgtgatgggctccagcattgatggtcgccccgtcctgcccgcaaactctactaccttgacctacgagaccgtgtctggaacgccgttggagactgcagcctccgccgccgcttcagccgctgcagccaccgcccgcgggattgtgactgactttgctttcctgagcccgcttgcaagcagtgcagcttcccgttcatccgcccgcgatgacaagttgacggctcttttggcacaattggattctttgacccgggaacttaatgtcgtttctcagcagctgttggatctgcgccagcaggtttctgccctgaaggcttcctcccctcccaatgcggtttaa

SEQ ID NO: 785 - DNA, 1302 bp, Adenovirus C2
  MISC_FEATURE (1)..(1302): C2.orf00072 E1B large T antigen
atggaacccgagagccggcctggaccctcgggaatgaatgttgtacaggtggctgaactgtttccagaactgagacgcattttaaccattaacgaggatgggcaggggctaaagggggtaaagagggagcggggggcttctgaggctacagaggaggctaggaatctaacttttagcttaatgaccagacaccgtcctgagtgtgttacttttcagcagattaaggataattgcgctaatgagcttgatctgctggcgcagaagtattccatagagcagctgaccacttactggctgcagccaggggatgattttgaggaggctattagggtatatgcaaaggtggcacttaggccagattgcaagtacaagattagcaaacttgtaaatatcaggaattgttgctacatttctgggaacggggccgaggtggagatagatacggaggatagggtggcctttagatgtagcatgataaatatgtggccgggggtgcttggcatggacggggtggttattatgaatgtgaggtttactggtcccaattttagcggtacggttttcctggccaataccaatcttatcctacacggtgtaagcttctatgggtttaacaatacctgtgtggaagcctggaccgatgtaagggttcggggctgtgccttttactgctgctggaagggggtggtgtgtcgccccaaaagcagggcttcaattaagaaatgcctgtttgaaaggtgtaccttgggtatcctgtctgagggtaactccagggtgcgccacaatgtggcctccgactgtggttgcttcatgctagtgaaaagcgtggctgtgattaagcataacatggtgtgtggcaactgcgaggacagggcctctcagatgctgacctgctcggacggcaactgtcacttgctgaagaccattcacgtagccagccactctcgcaaggcctggccagtgtttgagcacaacatactgacccgctgttccttgcatttgggtaacaggaggggggtgttcctaccttaccaatgcaatttgagtcacactaagatattgcttgagcccgagagcatgtccaaggtgaacctgaacggggtgtttgacatgaccatgaagatctggaaggtgctgaggtacgatgagacccgcaccaggtgcagaccctgcgagtgtggcggtaaacatattaggaaccagcctgtgatgctggatgtgaccgaggagctgaggcccgatcacttggtgctggcctgcacccgcgctgagtttggctctagcgatgaagatacagattga

SEQ ID NO: 786 - DNA, 528 bp, Adenovirus C2
  MISC_FEATURE (1)..(528): C2.orf00073 E1B 19K protein
atggaggcttgggagtgtttggaagatttttctgctgtgcgtaacttgctggaacagagctctaacagtacctcttggttttggaggtttctgtggggctcctcccaggcaaagttagtctgcagaattaaggaggattacaagtgggaatttgaagagcttttgaaatcctgtggtgagctgtttgattctttgaatctgggtcaccaggcgcttttccaagagaaggtcatcaagactttggatttttccacaccggggcgcgctgcggctgctgttgcttttttgagttttataaaggataaatggagcgaagaaacccatctgagcggggggtacctgctggattttctggccatgcatctgtggagagcggtggtgagacacaagaatcgcctgctactgttgtcttccgtccgcccggcaataataccgacggaggagcaacagcaggaggaagccaggcggcggcggcggcaggagcagagcccatggaacccgagagccggcctggaccctcgggaatga

SEQ ID NO: 787 - DNA, 312 bp, Adenovirus C2
  MISC_FEATURE (1)..(312): C2.orf00074 E1A 26 kDa protein
gtgtctgaacctgagcctgagcccgagccagaaccggagcctgcaagacctacccggcgtcctaaattggtgcctgctatcctgagacgcccgacatcacctgtgtctagagaatgcaatagtagtacggatagctgtgactccggtccttctaacacacctcctgagatacacccggtggtcccgctgtgccccattaaaccagttgccgtgagagttggtgggcgtcgccaggctgtggaatgtatcgaggacttgcttaacgagtctgggcaacctttggacttgagctgtaaacgccccaggccataa

SEQ ID NO: 788 - DNA, 351 bp, Adenovirus C2
  MISC_FEATURE (1)..(351): C2.orf00076 E1A
atgttggcggtgcaggaagggattgacttattcacttttccgccggcgcccggttctccggagccgcctcacctttcccggcagcccgagcagccggagcagagagccttgggtccggtttctatgccaaaccttgtgccggaggtgatcgatcttacctgccacgaggctggctttccacccagtgacgacgaggatgaagagggtgaggagtttgtgttagattatgtggagcaccccgggcacggttgcaggtcttgtcattatcaccggaggaatacgggggacccagatattatgtgttcgctttgctatatgaggacctgtggcatgtttgtctacagtaagtga

SEQ ID NO: 789 - DNA, 141 bp, Artificial Sequence
  C5.orf00001 hypothetical protein
atgggaagtgacgtaacgtgggaaaacggaagtgacgatttgaggaagttgtgggttttttggctttcgtttctgggcgtaggttcgcgtgcggttttctgggtgttttttgtggactttaaccgttacgtcattttttag

SEQ ID NO: 790 - DNA, 387 bp, Adenovirus C5
  MISC_FEATURE (1)..(387): C5.orf00002 E4 ORF1 protein
atggctgccgctgtggaagcgctgtatgttgttctggagcgggagggtgctattttgcctaggcaggagggtttttcaggtgtttatgtgtttttctctcctattaattttgttatacctcctatgggggctgtaatgttgtctctacgcctgcgggtatgtattcccccgggctatttcggtcgctttttagcactgaccgatgtgaatcaacctgatgtgtttaccgagtcttacattatgactccggacatgaccgaggagctgtcggtggtgctttttaatcacggtgaccagtttttttacggtcacgccggcatggccgtagtccgtcttatgcttataagggttgtttttcctgttgtaagacaggcttctaatgtttaa

SEQ ID NO: 791 - DNA, 411 bp, Adenovirus C5
  MISC_FEATURE (1)..(411): C5.orf00004 E4 ORF2 protein
atgcagaaacccgcagacatgtttgagagaaaaatggtgtctttttctgtggtggttccggagcttacctgcctttatctgcatgagcatgactacgatgtgctttcttttttgcgcgaggctttgcctgattttttgagcagcaccttgcattttatatcgccgcccatgcaacaagcttacatcggggctacgctggttagcatagctccgagtatgcgtgtcataatcagtgtgggttcttttgtcatggttcctggcggggaagtggccgcgctggtccgtgcagacctgcacgattatgttcagctggccctgcgaagggacctacgggatcgcggtatttttgttaatgttccgcttttgaatcttatacaggtctgtgaggaacctgaatttttgcaatcatga

SEQ ID NO: 792 - DNA, 351 bp, Adenovirus C5
  MISC_FEATURE (1)..(351): C5.orf00005 E4 ORF3 protein
atgattcgctgcttgaggctgaaggtggagggcgctctggagcagatttttacaatggccggacttaatattcgggatttgcttagagatatattgagaaggtggcgagatgagaattatttgggcatggttgaaggtgctggaatgtttatagaggagattcaccctgaagggtttagcctttacgtccacttggacgtgagggccgtttgccttttggaagccattgtgcaacatcttacaaatgccattatctgttctttggctgtagagtttgaccacgccaccggaggggagcgcgttcacttaatagatcttcattttgaggttttggataatcttttggaataa

SEQ ID NO: 793 - DNA, 885 bp, Adenovirus C5
  MISC_FEATURE (1)..(885): C5.orf00007 E4 34K E4 34K protein
atgactacgtccggcgttccatttggcatgacactacgaccaacacgatctcggttgtctcggcgcactccgtacagtagggatcgtctacctccttttgagacagaaacccgcgctaccatactggaggatcatccgctgctgcccgaatgtaacactttgacaatgcacaacgtgagttacgtgcgaggtcttccctgcagtgtgggatttacgctgattcaggaatgggttgttccctgggatatggttctaacgcgggaggagcttgtaatcctgaggaagtgtatgcacgtgtgcctgtgttgtgccaacattgatatcatgacgagcatgatgatccatggttacgagtcctgggctctccactgtcattgttccagtcccggttccctgcagtgtatagccggcgggcaggttttggccagctggtttaggatggtggtggatggcgccatgtttaatcagaggtttatatggtaccgggaggtggtgaattacaacatgccaaaagaggtaatgtttatgtccagcgtgtttatgaggggtcgccacttaatctacctgcgcttgtggtatgatggccacgtgggttctgtggtccccgccatgagctttggatacagcgccttgcactgtgggattttgaacaatattgtggtgctgtgctgcagttactgtgctgatttaagtgagatcagggtgcgctgctgtgcccggaggacaaggcgccttatgctgcgggcggtgcgaatcatcgctgaggagaccactgccatgttgtattcctgcaggacggagcggcggcggcagcagtttattcgcgcgctgctgcagcaccaccgccctatcctgatgcacgattatgactctacccccatgtag

SEQ ID NO: 794 - DNA, 225 bp, Adenovirus C5
  MISC_FEATURE (1)..(225): C5.orf00008 E4 ORF6/7 protein
gtggctcagcagctggacagcgacatgaacttaagtgagctgcccggggagtttattaatatcactgatgagcgtttggctcgacaggaaaccgtgtggaatataacacctaagaatatgtctgttacccatgatatgatgctttttaaggccagccggggagaaaggactgtgtactctgtgtgttgggagggaggtggcaggttgaatactagggttctgtga

SEQ ID NO: 795 - DNA, 168 bp, Adenovirus C5
  MISC_FEATURE (1)..(168): C5.orf00009 U protein
atgaagatagtgggtgcggatggacaggaacaggaggaaactgacattccatttagattgtggagaaagtttgcagccaggaggaagctgcaataccagagctgggaggagggcaaggaggtgctgctgaataaactggacagaaatttgctaactgattttaagtaa

SEQ ID NO: 796 - DNA, 1746 bp, Adenovirus C5; identical to SEQ ID NO: 144
  MISC_FEATURE (1)..(1746): C5.orf00010 L5 fiber protein 62 kDa

SEQ ID NO: 797 - DNA, 387 bp, Adenovirus C5
  MISC_FEATURE (1)..(387): C5.orf00011 E3 control protein 14.7 kDa
atgactgacaccctagatctagaaatggacggaattattacagagcagcgcctgctagaaagacgcagggcagcggccgagcaacagcgcatgaatcaagagctccaagacatggttaacttgcaccagtgcaaaaggggtatcttttgtctggtaaagcaggccaaagtcacctacgacagtaataccaccggacaccgccttagctacaagttgccaaccaagcgtcagaaattggtggtcatggtgggagaaaagcccattaccataactcagcactcggtagaaaccgaaggctgcattcactcaccttgtcaaggacctgaggatctctgcacccttattaagaccctgtgcggtctcaaagatcttattccctttaactaa

SEQ ID NO: 798 - DNA, 399 bp, Adenovirus C5
  MISC_FEATURE (1)..(399): C5.orf00012 E3 14.9 kDa protein
atgaaatttactgtgacttttctgctgattatttgcaccctatctgcgttttgttccccgacctccaagcctcaaagacatatatcatgcagattcactcgtatatggaatattccaagttgctacaatgaaaaaagcgatctttccgaagcctggttatatgcaatcatctctgttatggtgttctgcagtaccatcttagccctagctatatatccctaccttgacattggctggaacgcaatagatgccatgaaccacccaactttccccgcgcccgctatgcttccactgcaacaagttgttgccggcggctttgtcccagccaatcagcctcgcccaccttctcccacccccactgaaatcagctactttaatctaacaggaggagatgactga

SEQ ID NO: 799 - DNA, 213 bp, Adenovirus C5
  MISC_FEATURE (1)..(213): C5.orf00014 E3 RID-alpha
atggtgtctgagatatgcaaagcgcacacagacccagtcaatgcactggataaaggcgatgaccacagtgatgaggctgcagatgagcgtgagggtgacaaatccgtaaagcaaatagactgtgaaggctggaatgcagtctacttcgatgtgagaaaccgcagccaatgtggagcacgcacaaaaaaagcgcaacaagggtcagtaatataa

SEQ ID NO: 800 - DNA, 360 bp, Adenovirus C5
  MISC_FEATURE (1)..(360): C5.orf00015 E3 10.7 kDa protein
atgtcagcatctgactttggccagcacctgtcccgcggatttgttccagtccaactacagcgacccaccctaacagagatgaccaacacaaccaacgcggccgccgctaccggacttacatctaccacaaatacaccccaagtttctgcctttgtcaataactgggataacttgggcatgtggtggttctccatagcgcttatgtttgtatgccttattattatgtggctcatctgctgcctaaagcgcaaacgcgcccgaccacccatctatagtcccatcattgtgctacacccaaacaatgatggaatccatagattggacggactgaaacacatgttcttttctcttacagtatga

SEQ ID NO: 801 - DNA, 483 bp, Adenovirus C5
  MISC_FEATURE (1)..(483): C5.orf00017 19K protein
atgattaggtacataatcctaggtttactcacccttgcgtcagcccacggtaccacccaaaaggtggattttaaggagccagcctgtaatgttacattcgcagctgaagctaatgagtgcaccactcttataaaatgcaccacagaacatgaaaagctgcttattcgccacaaaaacaaaattggcaagtatgctgtttatgctatttggcagccaggtgacactacagagtataatgttacagttttccagggtaaaagtcataaaacttttatgtatacttttccattttatgaaatgtgcgacattaccatgtacatgagcaaacagtataagttgtggcccccacaaaattgtgtggaaaacactggcactttctgctgcactgctatgctaattacagtgctcgctttggtctgtaccctactctatattaaatacaaaagcagacgcagctttattgaggaaaagaaaatgccttaa

SEQ ID NO: 802 - DNA, 114 bp, Adenovirus C5
  MISC_FEATURE (1)..(114): C5.orf00018 E3 CR1-alpha
gtgattctctttattcttatactaacgcttctctgcctaaggctcgccgcctgctgtgtgcacatttgcatttattgtcagctttttaaacgctggggtcgccacccaagatga

SEQ ID NO: 803 - DNA, 342 bp, Adenovirus C5
  MISC_FEATURE (1)..(342): C5.orf00020 E3 CR1-alpha1
gtgctgagtataataaatacagaaattaaaatatactggggctcctatcgccatcctgtaaacgccaccgtcttcacccgcccaagcaaaccaaggcgaaccttacctggtacttttaacatctctccctctgtgatttacaacagtttcaacccagacggagtgagtctacgagagaacctctccgagctcagctactccatcagaaaaaacaccaccctccttacctgccgggaacgtacgagtgcgtcaccggccgctgcaccacacctaccgcctgaccgtaaaccagactttttccggacagacctcaataactctgtttaccagaacaggaggtga

SEQ ID NO: 804 - DNA, 324 bp, Adenovirus C5
  MISC_FEATURE (1)..(324): C5.orf00021 E3 12.5 kDa immune modulating protein
atgttaagtggagaggcagagcaactgcgcctgaaacacctggtccactgtcgccgccacaagtgctttgcccgcgactccggtgagttttgctactttgaattgcccgaggatcatatcgagggcccggcgcacggcgtccggcttaccgcccagggagagcttgcccgtagcctgattcgggagtttacccagcgccccctgctagttgagcgggacaggggaccctgtgttctcactgtgatttgcaactgtcctaaccctggattacatcaagatctttgttgccatctctgtgctgagtataataaatacagaaattaa

SEQ ID NO: 805 - DNA, 684 bp, Adenovirus C5
  MISC_FEATURE (1)..(684): C5.orf00022 L4 VIII capsid protein
atgagcaaggaaattcccacgccctacatgtggagttaccagccacaaatgggacttgcggctggagctgcccaagactactcaacccgaataaactacatgagcgcgggaccccacatgatatcccgggtcaacggaatacgcgcccaccgaaaccgaattctcctggaacaggcggctattaccaccacacctcgtaataaccttaatccccgtagttggcccgctgccctggtgtaccaggaaagtcccgctcccaccactgtggtacttcccagagacgcccaggccgaagttcagatgactaactcaggggcgcagcttgcgggcggctttcgtcacagggtgcggtcgcccgggcagggtataactcacctgacaatcagagggcgaggtattcagctcaacgacgagtcggtgagctcctcgcttggtctccgtccggacgggacatttcagatcggcggcgccggccgctcttcattcacgcctcgtcaggcaatcctaactctgcagacctcgtcctctgagccgcgctctggaggcattggaactctgcaatttattgaggagtttgtgccatcggtctactttaaccccttctcgggacctcccggccactatccggatcaatttattcctaactttgacgcggtaaaggactcggcggacggctacgactga

SEQ ID NO: 806 - DNA, 465 bp, Adenovirus C5
  MISC_FEATURE (1)..(465): C5.orf00023 E2a_2 virion morphogenesis-associated protein 25 kDa
gtgggggcaacatctccttcgcccgccgctttcttctctaccatcacggcgtggccttcccccgtaacatcctgcattactaccgtcatctctacagcccatactgcaccggcggcagcggcagcaacagcagcggccacacagaagcaaaggcgaccggatagcaagactctgacaaagcccaagaaatccacagcggcggcagcagcaggaggaggagcgctgcgtctggcgcccaacgaacccgtatcgacccgcgagcttagaaacaggatttttcccactctgtatgctatatttcaacagagcaggggccaagaacaagagctgaaaataaaaaacaggtctctgcgatccctcacccgcagctgcctgtatcacaaaagcgaagatcagcttcggcgcacgctggaagacgcggaggctctcttcagtaaatactgcgcgctgactcttaaggactag

SEQ ID NO: 807 - DNA, 2424 bp, Adenovirus C5
  MISC_FEATURE (1)..(2424): C5.orf00027 L5 hexon assembly-associated protein 90 kDa
atggagtcagtcgagaagaaggacagcctaaccgccccctctgagttcgccaccaccgcctccaccgatgccgccaacgcgcctaccaccttccccgtcgaggcacccccgcttgaggaggaggaagtgattatcgagcaggacccaggttttgtaagcgaagacgacgaggaccgctcagtaccaacagaggataaaaagcaagaccaggacaacgcagaggcaaacgaggaacaagtcgggcggggggacgaaaggcatggcgactacctagatgtgggagacgacgtgctgttgaagcatctgcagcgccagtgcgccattatctgcgacgcgttgcaagagcgcagcgatgtgcccctcgccatagcggatgtcagccttgcctacgaacgccacctattctcaccgcgcgtaccccccaaacgccaagaaaacggcacatgcgagcccaacccgcgcctcaacttctaccccgtatttgccgtgccagaggtgcttgccacctatcacatctttttccaaaactgcaagatacccctatcctgccgtgccaaccgcagccgagcggacaagcagctggccttgcggcagggcgctgtcatacctgatatcgcctcgctcaacgaagtgccaaaaatctttgagggtcttggacgcgacgagaagcgcgcggcaaacgctctgcaacaggaaaacagcgaaaatgaaagtcactctggagtgttggtggaactcgagggtgacaacgcgcgcctagccgtactaaaacgcagcatcgaggtcacccactttgcctacccggcacttaacctaccccccaaggtcatgagcacagtcatgagtgagctgatcgtgcgccgtgcgcagcccctggagagggatgcaaatttgcaagaacaaacagaggagggcctacccgcagttggcgacgagcagctagcgcgctggcttcaaacgcgcgagcctgccgacttggaggagcgacgcaaactaatgatggccgcagtgctcgttaccgtggagcttgagtgcatgcagcggttctttgctgacccggagatgcagcgcaagctagaggaaacattgcactacacctttcgacagggctacgtacgccaggcctgcaagatctccaacgtggagctctgcaacctggtctcctaccttggaattttgcacgaaaaccgccttgggcaaaacgtgcttcattccacgctcaagggcgaggcgcgccgcgactacgtccgcgactgcgtttacttatttctatgctacacctggcagacggccatgggcgtttggcagcagtgcttggaggagtgcaacctcaaggagctgcagaaactgctaaagcaaaacttgaaggacctatggacggccttcaacgagcgctccgtggccgcgcacctggcggacatcattttccccgaacgcctgcttaaaaccctgcaacagggtctgccagacttcaccagtcaaagcatgttgcagaactttaggaactttatcctagagcgctcaggaatcttgcccgccacctgctgtgcacttcctagcgactttgtgcccattaagtaccgcgaatgccctccgccgctttggggccactgctaccttctgcagctagccaactaccttgcctaccactctgacataatggaagacgtgagcggtgacggtctactggagtgtcactgtcgctgcaacctatgcaccccgcaccgctccctggtttgcaattcgcagctgcttaacgaaagtcaaattatcggtacctttgagctgcagggtccctcgcctgacgaaaagtccgcggctccggggttgaaactcactccggggctgtggacgtcggcttaccttcgcaaatttgtacctgaggactaccacgcccacgagattaggttctacgaagaccaatcccgcccgcctaatgcggagcttaccgcctgcgtcattacccagggccacattcttggccaattgcaagccatcaacaaagcccgccaagagtttctgctacgaaagggacggggggtttacttggacccccagtccggcgaggagctcaacccaatccccccgccgccgcagccctatcagcagcagccgcgggcccttgcttcccaggatggcacccaaaaagaagctgcagctgccgccgccacccacggacgaggaggaatactgggacagtcaggcagaggaggttttggacgaggaggaggaggacatgatggaagactgggagagcctagacgaggaagcttccgaggtcgaagaggtgtcagacgaaacaccgtcaccctcggtcgcattcccctcgccggcgccccagaaatcggcaaccggttccagcatggctacaacctccgctcctcaggcgccgccggcactgcccgttcgccgacccaaccgtag

SEQ ID NO: 808 - DNA, 1590 bp, Adenovirus C5
  MISC_FEATURE (1)..(1590): C5.orf00028 E2A ssDNA-binding protein
atggccagtcgggaagaggagcagcgcgaaaccacccccgagcgcggacgcggtgcggcgcgacgtcccccaaccatggaggacgtgtcgtccccgtccccgtcgccgccgcctccccgggcgcccccaaaaaagcggatgaggcggcgtatcgagtccgaggacgaggaagactcatcacaagacgcgctggtgccgcgcacacccagcccgcggccatcgacctcggcggcggatttggccattgcgcccaagaagaaaaagaagcgcccttctcccaagcccgagcgcccgccatcaccagaggtaatcgtggacagcgaggaagaaagagaagatgtggcgctacaaatggtgggtttcagcaacccaccggtgctaatcaagcatggcaaaggaggtaagcgcacagtgcggcggctgaatgaagacgacccagtggcgcgtggtatgcggacgcaagaggaagaggaagagcccagcgaagcggaaagtgaaattacggtgatgaacccgctgagtgtgccgatcgtgtctgcgtgggagaagggcatggaggctgcgcgcgcgctgatggacaagtaccacgtggataacgatctaaaggcgaacttcaaactactgcctgaccaagtggaagctctggcggccgtatgcaagacctggctgaacgaggagcaccgcgggttgcagctgaccttcaccagcaacaagacctttgtgacgatgatggggcgattcctgcaggcgtacctgcagtcgtttgcagaggtgacctacaagcatcacgagcccacgggctgcgcgttgtggctgcaccgctgcgctgagatcgaaggcgagcttaagtgtctacacggaagcattatgataaataaggagcacgtgattgaaatggatgtgacgagcgaaaacgggcagcgcgcgctgaaggagcagtctagcaaggccaagatcgtgaagaaccggtggggccgaaatgtggtgcagatctccaacaccgacgcaaggtgctgcgtgcacgacgcggcctgtccggccaatcagttttccggcaagtcttgcggcatgttcttctctgaaggcgcaaaggctcaggtggcttttaagcagatcaaggcttttatgcaggcgctgtatcctaacgcccagaccgggcacggtcaccttttgatgccactacggtgcgagtgcaactcaaagcctgggcacgcgccctttttgggaaggcagctaccaaagttgactccgttcgccctgagcaacgcggaggacctggacgcggatctgatctccgacaagagcgtgctggccagcgtgcaccacccggcgctgatagtgttccagtgctgcaaccctgtgtatcgcaactcgcgcgcgcagggcggaggccccaactgcgacttcaagatatcggcgcccgacctgctaaacgcgttggtgatggtgcgcagcctgtggagtgaaaacttcaccgagctgccgcggatggttgtgcctgagtttaagtggagcactaaacaccagtatcgcaacgtgtccctgccagtggcgcatagcgatgcgcggcagaacccctttgatttttaa

SEQ ID NO: 809 - DNA, 615 bp, Adenovirus C5
  MISC_FEATURE (1)..(615): C5.orf00029 L3 protease
atgggctccagtgagcaggaactgaaagccattgtcaaagatcttggttgtgggccatattttttgggcacctatgacaagcgctttccaggctttgtttctccacacaagctcgcctgcgccatagtcaatacggccggtcgcgagactgggggcgtacactggatggcctttgcctggaacccgcactcaaaaacatgctacctctttgagccctttggcttttctgaccagcgactcaagcaggtttaccagtttgagtacgagtcactcctgcgccgtagcgccattgcttcttcccccgaccgctgtataacgctggaaaagtccacccaaagcgtacaggggcccaactcggccgcctgtggactattctgctgcatgtttctccacgcctttgccaactggccccaaactcccatggatcacaaccccaccatgaaccttattaccggggtacccaactccatgctcaacagtccccaggtacagcccaccctgcgtcgcaaccaggaacagctctacagcttcctggagcgccactcgccctacttccgcagccacagtgcgcagattaggagcgccacttctttttgtcacttgaaaaacatgtaa

SEQ ID NO: 810 - DNA, 2859 bp, Adenovirus C5; identical to SEQ ID NO: 204
  MISC_FEATURE (1)..(2859): C5.orf00030 L3 hexon

SEQ ID NO: 811 - DNA, 753 bp, Adenovirus C5
  MISC_FEATURE (1)..(753): C5.orf00032 pVI hexon-associated protein 27 kDa
atggaagacatcaactttgcgtctctggccccgcgacacggctcgcgcccgttcatgggaaactggcaagatatcggcaccagcaatatgagcggtggcgccttcagctggggctcgctgtggagcggcattaaaaatttcggttccaccgttaagaactatggcagcaaggcctggaacagcagcacaggccagatgctgagggataagttgaaagagcaaaatttccaacaaaaggtggtagatggcctggcctctggcattagcggggtggtggacctggccaaccaggcagtgcaaaataagattaacagtaagcttgatccccgccctcccgtagaggagcctccaccggccgtggagacagtgtctccagaggggcgtggcgaaaagcgtccgcgccccgacagggaagaaactctggtgacgcaaatagacgagcctccctcgtacgaggaggcactaaagcaaggcctgcccaccacccgtcccatcgcgcccatggctaccggagtgctgggccagcacacacccgtaacgctggacctgcctccccccgccgacacccagcagaaacctgtgctgccaggcccgaccgccgttgttgtaacccgtcctagccgcgcgtccctgcgccgcgccgccagcggtccgcgatcgttgcggcccgtagccagtggcaactggcaaagcacactgaacagcatcgtgggtctgggggtgcaatccctgaagcgccgacgatgcttctga

SEQ ID NO: 812 - DNA, 243 bp, Adenovirus C5; identical to SEQ ID NO: 736
  MISC_FEATURE (1)..(243): C5.orf00034 L2 X core protein

SEQ ID NO: 813 - DNA, 1140 bp, Adenovirus C5
  MISC_FEATURE (1)..(1140): C5.orf00035 pV minor core protein 42 kDa
atgtatccagcggcggcggcgcgcaacgaagctatgtccaagcgcaaaatcaaagaagagatgctccaggtcatcgcgccggagatctatggccccccgaagaaggaagagcaggattacaagccccgaaagctaaagcgggtcaaaaagaaaaagaaagatgatgatgatgaacttgacgacgaggtggaactgctgcacgctaccgcgcccaggcgacgggtacagtggaaaggtcgacgcgtaaaacgtgttttgcgacccggcaccaccgtagtctttacgcccggtgagcgctccacccgcacctacaagcgcgtgtatgatgaggtgtacggcgacgaggacctgcttgagcaggccaacgagcgcctcggggagtttgcctacggaaagcggcataaggacatgctggcgttgccgctggacgagggcaacccaacacctagcctaaagcccgtaacactgcagcaggtgctgcccgcgcttgcaccgtccgaagaaaagcgcggcctaaagcgcgagtctggtgacttggcacccaccgtgcagctgatggtacccaagcgccagcgactggaagatgtcttggaaaaaatgaccgtggaacctgggctggagcccgaggtccgcgtgcggccaatcaagcaggtggcgccgggactgggcgtgcagaccgtggacgttcagatacccactaccagtagcaccagtattgccaccgccacagagggcatggagacacaaacgtccccggttgcctcagcggtggcggatgccgcggtgcaggcggtcgctgcggccgcgtccaagacctctacggaggtgcaaacggacccgtggatgtttcgcgtttcagccccccggcgcccgcgccgttcgaggaagtacggcgccgccagcgcgctactgcccgaatatgccctacatccttccattgcgcctacccccggctatcgtggctacacctaccgccccagaagacgagcaactacccgacgccgaaccaccactggaacccgccgccgccgtcgccgtcgccagcccgtgctggccccgatttccgtgcgcagggtggctcgcgaaggaggcaggaccctggtgctgccaacagcgcgctaccaccccagcatcgtttaa

SEQ ID NO: 814 - DNA, 597 bp, Adenovirus C5
  MISC_FEATURE (1)..(597): C5.orf00036 L2 VII core protein
atgtccatccttatatcgcccagcaataacacaggctggggcctgcgcttcccaagcaagatgtttggcggggccaagaagcgctccgaccaacacccagtgcgcgtgcgcgggcactaccgcgcgccctggggcgcgcacaaacgcggccgcactgggcgcaccaccgtcgatgacgccatcgacgcggtggtggaggaggcgcgcaactacacgcccacgccgccaccagtgtccacagtggacgcggccattcagaccgtggtgcgcggagcccggcgctatgctaaaatgaagagacggcggaggcgcgtagcacgtcgccaccgccgccgacccggcactgccgcccaacgcgcggcggcggccctgcttaaccgcgcacgtcgcaccggccgacgggcggccatgcgggccgctcgaaggctggccgcgggtattgtcactgtgccccccaggtccaggcgacgagcggccgccgcagcagccgcggccattagtgctatgactcagggtcgcaggggcaacgtgtattgggtgcgcgactcggttagcggcctgcgcgtgcccgtgcgcacccgccccccgcgcaactag

SEQ ID NO: 815 - DNA, 1716 bp, Adenovirus C5
  MISC_FEATURE (1)..(1716): C5.orf00039 pIII
atgcggcgcgcggcgatgtatgaggaaggtcctcctccctcctacgagagtgtggtgagcgcggcgccagtggcggcggcgctgggttctcccttcgatgctcccctggacccgccgtttgtgcctccgcggtacctgcggcctaccggggggagaaacagcatccgttactctgagttggcacccctattcgacaccacccgtgtgtacctggtggacaacaagtcaacggatgtggcatccctgaactaccagaacgaccacagcaactttctgaccacggtcattcaaaacaatgactacagcccgggggaggcaagcacacagaccatcaatcttgacgaccggtcgcactggggcggcgacctgaaaaccatcctgcataccaacatgccaaatgtgaacgagttcatgtttaccaataagtttaaggcgcgggtgatggtgtcgcgcttgcctactaaggacaatcaggtggagctgaaatacgagtgggtggagttcacgctgcccgagggcaactactccgagaccatgaccatagaccttatgaacaacgcgatcgtggagcactacttgaaagtgggcagacagaacggggttctggaaagcgacatcggggtaaagtttgacacccgcaacttcagactggggtttgaccccgtcactggtcttgtcatgcctggggtatatacaaacgaagccttccatccagacatcattttgctgccaggatgcggggtggacttcacccacagccgcctgagcaacttgttgggcatccgcaagcggcaacccttccaggagggctttaggatcacctacgatgatctggagggtggtaacattcccgcactgttggatgtggacgcctaccaggcgagcttgaaagatgacaccgaacagggcgggggtggcgcaggcggcagcaacagcagtggcagcggcgcggaagagaactccaacgcggcagccgcggcaatgcagccggtggaggacatgaacgatcatgccattcgcggcgacacctttgccacacgggctgaggagaagcgcgctgaggccgaagcagcggccgaagctgccgcccccgctgcgcaacccgaggtcgagaagcctcagaagaaaccggtgatcaaacccctgacagaggacagcaagaaacgcagttacaacctaataagcaatgacagcaccttcacccagtaccgcagctggtaccttgcatacaactacggcgaccctcagaccggaatccgctcatggaccctgctttgcactcctgacgtaacctgcggctcggagcaggtctactggtcgttgccagacatgatgcaagaccccgtgaccttccgctccacgcgccagatcagcaactttccggtggtgggcgccgagctgttgcccgtgcactccaagagcttctacaacgaccaggccgtctactcccaactcatccgccagtttacctctctgacccacgtgttcaatcgctttcccgagaaccagattttggcgcgcccgccagcccccaccatcaccaccgtcagtgaaaacgttcctgctctcacagatcacgggacgctaccgctgcgcaacagcatcggaggagtccagcgagtgaccattactgacgccagacgccgcacctgcccctacgtttacaaggccctgggcatagtctcgccgcgcgtcctatcgagccgcactttttga

SEQ ID NO: 816 - DNA, 1758 bp, Adenovirus C5
  MISC_FEATURE (1)..(1758): C5.orf00040 L1 IIIa capsid protein
atgatgcaagacgcaacggacccggcggtgcgggcggcgctgcagagccagccgtccggccttaactccacggacgactggcgccaggtcatggaccgcatcatgtcgctgactgcgcgcaatcctgacgcgttccggcagcagccgcaggccaaccggctctccgcaattctggaagcggtggtcccggcgcgcgcaaaccccacgcacgagaaggtgctggcgatcgtaaacgcgctggccgaaaacagggccatccggcccgacgaggccggcctggtctacgacgcgctgcttcagcgcgtggctcgttacaacagcggcaacgtgcagaccaacctggaccggctggtgggggatgtgcgcgaggccgtggcgcagcgtgagcgcgcgcagcagcagggcaacctgggctccatggttgcactaaacgccttcctgagtacacagcccgccaacgtgccgcggggacaggaggactacaccaactttgtgagcgcactgcggctaatggtgactgagacaccgcaaagtgaggtgtaccagtctgggccagactattttttccagaccagtagacaaggcctgcagaccgtaaacctgagccaggctttcaaaaacttgcaggggctgtggggggtgcgggctcccacaggcgaccgcgcgaccgtgtctagcttgctgacgcccaactcgcgcctgttgctgctgctaatagcgcccttcacggacagtggcagcgtgtcccgggacacatacctaggtcacttgctgacactgtaccgcgaggccataggtcaggcgcatgtggacgagcatactttccaggagattacaagtgtcagccgcgcgctggggcaggaggacacgggcagcctggaggcaaccctaaactacctgctgaccaaccggcggcagaagatcccctcgttgcacagtttaaacagcgaggaggagcgcattttgcgctacgtgcagcagagcgtgagccttaacctgatgcgcgacggggtaacgcccagcgtggcgctggacatgaccgcgcgcaacatggaaccgggcatgtatgcctcaaaccggccgtttatcaaccgcctaatggactacttgcatcgcgcggccgccgtgaaccccgagtatttcaccaatgccatcttgaacccgcactggctaccgccccctggtttctacaccgggggattcgaggtgcccgagggtaacgatggattcctctgggacgacatagacgacagcgtgttttccccgcaaccgcagaccctgctagagttgcaacagcgcgagcaggcagaggcggcgctgcgaaaggaaagcttccgcaggccaagcagcttgtccgatctaggcgctgcggccccgcggtcagatgctagtagcccatttccaagcttgatagggtctcttaccagcactcgcaccacccgcccgcgcctgctgggcgaggaggagtacctaaacaactcgctgctgcagccgcagcgcgaaaaaaacctgcctccggcatttcccaacaacgggatagagagcctagtggacaagatgagtagatggaagacgtacgcgcaggagcacagggacgtgccaggcccgcgcccgcccacccgtcgtcaaaggcacgaccgtcagcggggtctggtgtgggaggacgatgactcggcagacgacagcagcgtcctggatttgggagggagtggcaacccgtttgcgcaccttcgccccaggctggggagaatgttttaa

SEQ ID NO: 817 - DNA, 1248 bp, Adenovirus C5
  MISC_FEATURE (1)..(1248): C5.orf00041 L1 47 kDa protein
atgcatccggtgctgcggcagatgcgcccccctcctcagcagcggcaagagcaagagcagcggcagacatgcagggcaccctcccctcctcctaccgcgtcaggaggggcgacatccgcggttgacgcggcagcagatggtgattacgaacccccgcggcgccgggcccggcactacctggacttggaggagggcgagggcctggcgcggctaggagcgccctctcctgagcggcacccaagggtgcagctgaagcgtgatacgcgtgaggcgtacgtgccgcggcagaacctgtttcgcgaccgcgagggagaggagcccgaggagatgcgggatcgaaagttccacgcagggcgcgagctgcggcatggcctgaatcgcgagcggttgctgcgcgaggaggactttgagcccgacgcgcgaaccgggattagtcccgcgcgcgcacacgtggcggccgccgacctggtaaccgcatacgagcagacggtgaaccaggagattaactttcaaaaaagctttaacaaccacgtgcgtacgcttgtggcgcgcgaggaggtggctataggactgatgcatctgtgggactttgtaagcgcgctggagcaaaacccaaatagcaagccgctcatggcgcagctgttccttatagtgcagcacagcagggacaacgaggcattcagggatgcgctgctaaacatagtagagcccgagggccgctggctgctcgatttgataaacatcctgcagagcatagtggtgcaggagcgcagcttgagcctggctgacaaggtggccgccatcaactattccatgcttagcctgggcaagttttacgcccgcaagatataccataccccttacgttcccatagacaaggaggtaaagatcgaggggttctacatgcgcatggcgctgaaggtgcttaccttgagcgacgacctgggcgtttatcgcaacgagcgcatccacaaggccgtgagcgtgagccggcggcgcgagctcagcgaccgcgagctgatgcacagcctgcaaagggccctggctggcacgggcagcggcgatagagaggccgagtcctactttgacgcgggcgctgacctgcgctgggccccaagccgacgcgccctggaggcagctggggccggacctgggctggcggtggcacccgcgcgcgctggcaacgtcggcggcgtggaggaatatgacgaggacgatgagtacgagccagaggacggcgagtactaa

SEQ ID NO: 818 - DNA, 309 bp, Adenovirus C5
  MISC_FEATURE (1)..(309): C5.orf00044 E2B DNA terminal protein
gtgctccatggtcgggacgctctggccggtcaggcgcgcgcaatcgttgacgctctagaccgtgcaaaaggagagcctgtaagcgggcactcttccgtggtctggtggataaattcgcaagggtatcatggcggacgaccggggttcgagccccgtatccggccgtccgccgtgatccatgcggttaccgcccgcgtgtcgaacccaggtgtgcgacgtcagacaacgggggagtgctccttttggcttccttccaggcgcggcggctgctgcgctagcttttttggccactggccgcgcgcagcgtaa

SEQ ID NO: 819 - DNA, 1962 bp, Adenovirus C5
  MISC_FEATURE (1)..(1962): C5.orf00045 pTP
atggagcactttttgccgctgcgcaacatctggaaccgcgtccgcgactttccgcgcgcctccaccaccgccgccggcatcacctggatgtccaggtacatctacggatatcatcgccttatgttggaagatctcgcccccggagccccggccaccctacgctggcccctctaccgccagccgccgccgcactttttggtgggataccagtacctggtgcggacttgcaacgactacgtatttgactcgagggcttactcgcgtctcaggtacaccgagctctcgcagccgggtcaccagaccgttaactggtccgttatggccaactgcacttacaccatcaacacgggcgcataccaccgctttgtggacatggatgacttccagtctaccctcacgcaggtgcagcaggccatattagccgagcgcgttgtcgccgacctagccctgcttcagccgatgaggggcttcggggtcacacgcatgggaggaagagggcgccacctacggccaaactccgccgccgccgcagcgatagatgcaagagatgcaggacaagaggaaggagaagaagaagtgccggtagaaaggctcatgcaagactactacaaagacctgcgccgatgtcaaaacgaagcctggggcatggccgaccgcctgcgcattcagcaggccggacccaaggacatggtgcttctgtcgaccatccgccgtctcaagaccgcctactttaattacatcatcagcagcacctccgccagaaacaaccccgaccgccgcccgctgccgcccgccacggtgctcagcctaccttgcgactgtgactggttagacgcctttctcgagaggttttccgatccggtcgatgcggactcgctcaggtccctcggcggcggagtacctacacaacaattgttgagatgcatcgttagcgccgtatccctgccgcatggcagccccccgccaacccataaccgggacatgacgggcggcgtcttccaactgcgcccccgcgagaacggccgcgccgtcaccgagaccatgcgccgtcgccgcggggagatgatcgagcgctttgtcgaccgcctcccggtgcgccgtcgtcgccgccgtgtcccccctcccccaccgccgccagaagaagaagaaggggaggcccttatggaagaggagattgaagaagaagaagaggcccctgtagcctttgagcgcgaggtgcgcgacactgtcgccgagctcatccgtcttctggaggaggagttaaccgtgtcggcgcgcaactcccagtttttcaacttcgccgtggacttctacgaggccatggagcgccttgaggccttgggggatatcaacgaatccacgttgcgacgctgggttatgtacttcttcgtggcagaacacaccgccaccaccctcaactacctctttcagcgcctgcgaaactacgccgtcttcgcccggcacgtggagctcaatctcgcgcaggtggtcatgcgcgcccgcgatgccgaagggggcgtggtctacagccgcgtctggaacgagggaggcctcaacgccttctcgcagctcatggcccgcatttccaacgacctcgccgccaccgtggagcgagccggacgcggagatctccaggaggaagagatcgagcagttcatggccgagatcgcctatcaagacaactcaggagacgtgcaggagattttgcgccaggccgccgtcaacgacaccgaaattgattctgtcgaactctctttcaggttcaagctcaccgggcccgtcgtcttcacgcagaggcgccagattcaggagatcaaccgccgcgtcgtcgcgttcgccagcaacctacgcgcgcagcaccagctcctgcccgcgcgcggcgccgacgtgcccctgccccctctcccggcgggtccggagccccccctacctccgggggctcgcccgcgtcaccgcttttag

SEQ ID NO: 820 - DNA, 3309 bp, Adenovirus C5
  MISC_FEATURE (1)..(3309): C5.orf00046 E2B DNA polymerase
ttgcaagccatcgacgccgccaccaaccagcccctggaaattaggtatcacctggatctagcccgcgccctgacccgtctatgcgaggtaaacctgcaggagctcccgcctgacctgacgccgcgggagctccagaccatggacagctcccatctgcgcgatgttgtcatcaagctccgaccgccgcgcgcggacatctggactttgggctcgcgcggcgtggtggtccgatccaccgtaactcccctcgagcagccagacggtcaaggacaagcagccgaagtagaagaccaccagccaaacccgccaggcgaggggctcaaattcccactctgcttccttgtgcgcggtcgtcaggtcaacctcgtgcaggatgtacagcccgtgcaccgctgccagtactgcgcacgtttttacaaaagccagcacgagtgttcggcccgtcgcagggacttctactttcaccacatcaatagccactcctccaattggtggcgggagatccagttcttcccgatcggctcgcatcctcgcaccgagcgtctctttgtcacctacgatgtagagacctatacttggatgggggcctttgggaagcagctcgtgcccttcatgctggtcatgaagttcggcggagatgagcctctagtgactgccgcgcgagacctagccgcgaaccttggatgggaccgctgggaacaagacccgcttaccttctactgcatcaccccagaaaaaatggccataggtcgccagtttaggacctttcgcgaccacctgcaaatgctaatggcccgtgacctgtggagctcattcgtcgcttccaaccctcatcttgcagactgggccctttcagagcacgggctcagctcccctgaagagctcacctacgaggaacttaaaaaattgccttccatcaagggcatcccgcgcttcttggaactttacattgtgggccacaacatcaacggctttgacgagatcgtgctcgccgcccaggtaattaacaaccgttccgaggtgccgggacccttccgcatcacacgcaactttatgcctcgcgcgggaaagatactcttcaacgatgtcaccttcgccctgccaaatccgcgttccaaaaagcgcacggactttttgctctgggagcagggcggatgcgacgacactgacttcaaataccagtacctcaaagtcatggtcagggacacctttgcgctcacccacacctcgctccggaaggccgcgcaggcatacgcgctacccgtagaaaagggatgctgcgcctaccaggccgtcaaccagttctacatgctaggctcttaccgttcggaggccgacgggtttccgatccaagagtactggaaagaccgcgaagagtttgtcctcaaccgcgagctgtggaaaaaaaagggacaggataagtatgacatcatcaaggaaaccctggactactgcgccctagacgtgcaggtcaccgccgagctggtcaacaagctgcgcgactcctacgcctccttcgtgcgtgacgcggtaggtctcacagacgccagcttcaacgtcttccagcgtccaaccatatcatccaactcacatgccatcttcaggcagatagtcttccgagcagagcagcccgcccgtagcaacctcggtcccgacctcctcgctccctcgcacgaactatacgattacgtgcgcgccagcatccgcggtggaagatgctaccctacatatcttggaatactcagagagcccctctacgtttacgacatttgcggcatgtacgcctccgcgctcacccaccccatgccatggggtcccccactcaacccatacgagcgcgcgcttgccgcccgcgcatggcagcaggcgctagacttgcaaggatgcaagatagactacttcgacgcgcgcctgctgcccggggtctttaccgtggacgcagaccccccggacgagacgcagctagaccccctaccgccattctgctcgcgcaagggcggccgcctctgctggaccaacgagcgcctacgcggagaggtagccaccagcgttgaccttgtcaccctgcacaaccgcggttggcgcgtgcacctggtgcccgacgagcgcaccaccgtctttcccgaatggcggtgcgttgcgcgcgaatacgtgcagctaaacatcgcggccaaggagcgcgccgatcgcgacaaaaaccaaaccctgcgctccatcgccaagttgctgtccaacgccctctacgggtcgtttgccaccaagcttgacaacaaaaagattgtcttttctgaccagatggatgcggccaccctcaaaggcatcaccgcgggccaggtgaatatcaaatcctcctcgtttttggaaactgacaatcttagcgcagaagtcatgcccgcttttcagagggagtactcaccccaacagctggccctcgcagacagcgatgcggaagagagtgaggacgaacgcgcccccacccccttttatagccccccttcaggaacacccggtcacgtggcctacacctacaaaccaatcaccttccttgatgccgaagagggcgacatgtgtcttcacaccctggagcgagtggaccccctagtggacaacgaccgctacccctcccacttagcctccttcgtgctggcctggacgcgagcctttgtctcagagtggtccgagtttctatacgaggaggaccgcggaacaccgctcgaggacaggcctctcaagtctgtatacggggacacggacagccttttcgtcaccgagcgtggacaccggctcatggaaaccagaggtaagaaacgcatcaaaaagcatgggggaaacctggtttttgaccccgaacggccagagctcacctggctcgtggaatgcgagaccgtctgcggggcctgcggcgcggatgcctactccccggaatcggtatttctcgcgcccaagctctacgccctcaaaagtctgcactgcccctcgtgcggcgcctcctccaagggcaagctgcgcgccaagggccacgccgcggaggggctggactatgacaccatggtcaaatgctacctggccgacgcgcagggcgaagaccggcagcgcttcagcaccagcaggaccagcctcaagcgcaccctggccagcgcgcagcccggagcgcaccccttcaccgtgacccagactacgctgacgaggaccctgcgcccgtggaaagacatgaccctggcccgtctggacgagcaccgactactgccgtacagcgaaagccgccccaacccgcgaaacgaggagatatgctggatcgagatgccgtag

SEQ ID NO: 821 - DNA, 1128 bp, Adenovirus C5
  MISC_FEATURE (1)..(1128): C5.orf00047 IVa2 virion morphogenesis-associated protein 51 kDa
atgctggatcgagatgccgtagagcaggtgaccgagctgtgggaccgcctggaactgcttggtcaaacgctcaaaagcatgcctacggcggacggtctcaaaccgttgaaaaactttgcttccttgcaagaactgctatcgctgggcggcgagcgccttctggcggatttggtcagggaaaacatgcgagtcagggacatgcttaacgaagtggcccccctgctcagggatgacggcagctgcagctctcttaactaccagttgcagccggtaataggtgtgatttacgggcccaccggctgcggtaagtcgcagctgctcaggaacctgctttcttcccagctgatctcccctaccccggaaaccgttttcttcatcgccccgcaggtagacatgatccccccatctgaactcaaagcgtgggaaatgcaaatctgtgagggtaactacgcccctgggccggatggaaccattataccgcagtctggcaccctccgcccgcgctttgtaaaaatggcctatgacgatctcatcctggaacacaactatgacgttagtgatcccagaaatatcttcgcccaggccgccgcccgtgggcccattgccatcattatggacgaatgcatggaaaatcttggaggtcacaagggcgtctccaagttcttccacgcatttccttctaagctacatgacaaatttcccaagtgcaccggatacactgtgctggtggttctgcacaacatgaatccccggagggatatggctgggaacatagccaacctaaaaatacagtccaagatgcatctcatatccccacgtatgcacccatcccagcttaaccgctttgtaaacacttacaccaagggcctgcccctggcaatcagcttgctactgaaagacatttttaggcaccacgcccagcgctcctgctacgactggatcatctacaacaccaccccgcagcatgaagctctgcagtggtgctacctccaccccagagacgggcttatgcccatgtatctgaacatccagagtcacctttaccacgtcctggaaaaaatacacaggaccctcaacgaccgagaccgctggtcccgggcctaccgcgcgcgcaaaacccctaaataa

SEQ ID NO: 822 - DNA, 423 bp, Adenovirus C5
  MISC_FEATURE (1)..(423): C5.orf00050 IX hexon-associated protein 14.5 kDa
atgagcaccaactcgtttgatggaagcattgtgagctcatatttgacaacgcgcatgcccccatgggccggggtgcgtcagaatgtgatgggctccagcattgatggtcgccccgtcctgcccgcaaactctactaccttgacctacgagaccgtgtctggaacgccgttggagactgcagcctccgccgccgcttcagccgctgcagccaccgcccgcgggattgtgactgactttgctttcctgagcccgcttgcaagcagtgcagcttcccgttcatccgcccgcgatgacaagttgacggctcttttggcacaattggattctttgacccgggaacttaatgtcgtttctcagcagctgttggatctgcgccagcaggtttctgccctgaaggcttcctcccctcccaatgcggtttaa

SEQ ID NO: 823 - DNA, 1491 bp, Adenovirus C5
  MISC_FEATURE (1)..(1491): C5.orf00052 E1B large T antigen
atggagcgaagaaacccatctgagcggggggtacctgctggattttctggccatgcatctgtggagagcggttgtgagacacaagaatcgcctgctactgttgtcttccgtccgcccggcgataataccgacggaggagcagcagcagcagcaggaggaagccaggcggcggcggcaggagcagagcccatggaacccgagagccggcctggaccctcgggaatgaatgttgtacaggtggctgaactgtatccagaactgagacgcattttgacaattacagaggatgggcaggggctaaagggggtaaagagggagcggggggcttgtgaggctacagaggaggctaggaatctagcttttagcttaatgaccagacaccgtcctgagtgtattacttttcaacagatcaaggataattgcgctaatgagcttgatctgctggcgcagaagtattccatagagcagctgaccacttactggctgcagccaggggatgattttgaggaggctattagggtatatgcaaaggtggcacttaggccagattgcaagtacaagatcagcaaacttgtaaatatcaggaattgttgctacatttctgggaacggggccgaggtggagatagatacggaggatagggtggcctttagatgtagcatgataaatatgtggccgggggtgcttggcatggacggggtggttattatgaatgtaaggtttactggccccaattttagcggtacggttttcctggccaataccaaccttatcctacacggtgtaagcttctatgggtttaacaatacctgtgtggaagcctggaccgatgtaagggttcggggctgtgccttttactgctgctggaagggggtggtgtgtcgccccaaaagcagggcttcaattaagaaatgcctctttgaaaggtgtaccttgggtatcctgtctgagggtaactccagggtgcgccacaatgtggcctccgactgtggttgcttcatgctagtgaaaagcgtggctgtgattaagcataacatggtatgtggcaactgcgaggacagggcctctcagatgctgacctgctcggacggcaactgtcacctgctgaagaccattcacgtagccagccactctcgcaaggcctggccagtgtttgagcataacatactgacccgctgttccttgcatttgggtaacaggaggggggtgttcctaccttaccaatgcaatttgagtcacactaagatattgcttgagcccgagagcatgtccaaggtgaacctgaacggggtgtttgacatgaccatgaagatctggaaggtgctgaggtacgatgagacccgcaccaggtgcagaccctgcgagtgtggcggtaaacatattaggaaccagcctgtgatgctggatgtgaccgaggagctgaggcccgatcacttggtgctggcctgcacccgcgctgagtttggctctagcgatgaagatacagattga

SEQ ID NO: 824 - DNA, 210 bp, Adenovirus C5
  MISC_FEATURE (1)..(210): C5.orf00053 E1B 19K protein
atgggtttcttcgctccatttatcctttataaaactcaaaaaagcaacagcagccgcagcgcgccccggtgtggaaaaatccaaagtcttgatgaccttctcttggaaaagcgcctggtgacccagattcaaagaatcaaacagctcaccacaggatttcaaaagctcttcaaattcccacttgtaatcctccttaattctgcagactaa

SEQ ID NO: 825 - DNA, 333 bp, Adenovirus C5
  MISC_FEATURE (1)..(333): C5.orf00055 E1A 26 kDa protein
gtgatttttttaaaaggtcctgtgtctgaacctgagcctgagcccgagccagaaccggagcctgcaagacctacccgccgtcctaaaatggcgcctgctatcctgagacgcccgacatcacctgtgtctagagaatgcaatagtagtacggatagctgtgactccggtccttctaacacacctcctgagatacacccggtggtcccgctgtgccccattaaaccagttgccgtgagagttggtgggcgtcgccaggctgtggaatgtatcgaggacttgcttaacgagcctgggcaacctttggacttgagctgtaaacgccccaggccataa

SEQ ID NO: 826 - DNA, 519 bp, Adenovirus C5
  MISC_FEATURE (1)..(519): C5.orf00056 E1A
atggccgccagtcttttggaccagctgatcgaagaggtactggctgataatcttccacctcctagccattttgaaccacctacccttcacgaactgtatgatttagacgtgacggcccccgaagatcccaacgaggaggcggtttcgcagatttttcccgactctgtaatgttggcggtgcaggaagggattgacttactcacttttccgccggcgcccggttctccggagccgcctcacctttcccggcagcccgagcagccggagcagagagccttgggtccggtttctatgccaaaccttgtaccggaggtgatcgatcttacctgccacgaggctggctttccacccagtgacgacgaggatgaagagggtgaggagtttgtgttagattatgtggagcaccccgggcacggttgcaggtcttgtcattatcaccggaggaatacgggggacccagatattatgtgttcgctttgctatatgaggacctgtggcatgtttgtctacagtaagtga

SEQ ID NO: 827 - DNA, 141 bp, Artificial Sequence
  C6.orf00001 hypothetical protein
atgggaagtgacgtatcgtgggaaaacggaagtgaagatttgaggaagttgtgggttttttggctttcgtttctgggcgtaggttcgcgtgcggttttctgggtggtttttgtggactttaaccgttacgtcattttttag

SEQ ID NO: 828 - DNA, 387 bp, Adenovirus C6; identical to SEQ ID NO: 714
  MISC_FEATURE (1)..(387): C6.orf00002 E4 ORF1 protein

SEQ ID NO: 829 - DNA, 411 bp, Adenovirus C6
  MISC_FEATURE (1)..(411): C6.orf00004 E4 ORF2 protein
atgcaggaacccgcagacatgtttgagagaaaaatggtgtctttttctgtggtggttccggaacttacctgcctttatctgcatgagcatgactacgatgtgcttgcttttttgcgcgaggctttgcctgattttttgagcagtaccttgcattttatatcgccgcccatgcaacaagcttacatcggggctacgctggttagcatagctccgagtatgcgtgtcataatcagtgtgggttcttttgtcatggttcctggcggggaagtggccgcgctggtccgtgcagacctgcacgattatgttcagctggccctgcgaagggacctacgggatcgcggtatttttgttaatgttccgcttttgaatcttatacaggtctgtgaggaacctgaatttttgcaatcatga

SEQ ID NO: 830 - DNA, 351 bp, Adenovirus C6; identical to SEQ ID NO: 756
  MISC_FEATURE (1)..(351): C6.orf00005 E4 ORF3 protein

SEQ ID NO: 831 - DNA, 885 bp, Adenovirus C6
  MISC_FEATURE (1)..(885): C6.orf00008 E4 34K E4 34K protein
atgactacgtccggcgttccatttggcatgacactacgaccaacacgatctcggttgtctcggcgcactccgtacagtagggatcgcctacctccttttgagacagagacacgcgctaccatactggaggatcatccgctgctgcccgaatgtaacactttgacaatgcacaacgtgagttacgtgcgaggtcttccctgcagtgtgggatttacgctgattcaggaatgggttgttccctgggatatggttctgacgcgggaggagcttgtaatcctgaggaagtgtatgcacgtgtgcctgtgttgtgccaacattgatatcatgacgagcatgatgatccatggttacgagtcctgggctctccactgtcattgttccagtcccggttccctgcagtgcatagccggcgggcaggttttggccagctggtttaggatggtggtggatggcgccatgtttaatcagaggtttatatggtaccgggaggtggtgaattacaacatgccaaaagaggtaatgtttatgtccagcgtgtttatgaggggtcgccacttaatctacctgcgcttgtggtatgatggccacgtgggttctgtggtccccgccatgagctttggatacagcgccttgcactgtgggattttaaacaatattgtggtactgtgctgcagttactgtgctgacttaagtgagatcagggtgcgctgctgtgcccggaggacaaggcgccttatgctgcgggcggtgcgaatcatcgctgaggagaccactgccatgttgtattcctgcaggacggagcggcggcggcagcagtttattcgcgcgctgctgcagcaccaccgccctatcctgatgcacgattatgactctacccccatgtag

SEQ ID NO: 832 - DNA, 225 bp, Adenovirus C6
  MISC_FEATURE (1)..(225): C6.orf00009 E4 ORF6/7 protein
gtggctcagcagctggacagcgacatgaacttaagcgagctgcccggggagtttattaacatcactgatgagcgtttggctcgacaggagaccgtgtggaatataacacctaagaatatgtctgttacccatgatatgatgctgtttaaggccagccggggagaaaggactgtgtactctgtgtgttgggagggaggtggcaggttgaatactagggttctgtga

SEQ ID NO: 833 - DNA, 168 bp, Adenovirus C6
  MISC_FEATURE (1)..(168): C6.orf00011 U protein
atgaagatagtgggtgcggagggacaagaacatgaggaatttgacatcccatttagactttggagaaagttcgcagctaaaaggctgctgaaataccagagttgggaggagggaaaggaggtgatgctgaataagctggacaaagatttgctgactgattttaagtaa

SEQ ID NO: 834 - DNA, 1587 bp, Adenovirus C6; identical to SEQ ID NO: 145
  MISC_FEATURE (1)..(1587): C6.orf00012 L5 fiber protein 62 kDa

SEQ ID NO: 835 - DNA, 387 bp, Adenovirus C6
  MISC_FEATURE (1)..(387): C6.orf00014 E3 control protein 14.7 kDa
atgactgaatctctagatctagaattggatggaattaacaccgaacagcgcctactagaaaggcgcaaggcggcgtccgagcgagaacgcctaaaacaagaagttgaagacatggttaacctgcaccagtgtaaaagaggtatcttttgtgtggtcaagcaggccaaacttacctacgaaaaaaccactaccggcaaccgccttagctacaagctacccacccagcgccaaaaactggtgcttatggtgggagaaaaacctatcaccgtcacccagcactcggcagaaacagaaggctgcctgcacttcccctatcagggtccagaggacctctgcactcttattaaaaccatgtgtggcattagagatcttattccattcaactaa

SEQ ID NO: 836 - DNA, 393 bp, Adenovirus C6
  MISC_FEATURE (1)..(393): C6.orf00016 E3 RID-beta
atgaaacggattgtcacttttgttttgctgattttctgcgccctacctgtgctttgctcccaaacctcagcgcctcccaaaagacatatttcctgcagattcactcaaatatggaacattcccagctgctacaacaaacagagcgatttgtcagaagcctggttatacgccatcatctctgtcatggttttttgcagtaccatttttgccctagccatatacccataccttgacattggttggaatgccatagatgccatgaaccaccctactttcccagcgcccaatgtcataccactgcaacaggttattgccccaatcaatcagcctcgccccccttctcccacccccactgagattagctactttaatttgacaggtggagatgactga

SEQ ID NO: 837 - DNA, 207 bp, Adenovirus C6
  MISC_FEATURE (1)..(207): C6.orf00017 E3 RID-alpha
atggtgcctaaggtacgcaatgcgcacacaaatccagtcaatgaactgaatgaaggcgatgactacagtgacgaggctgcagatgaggataagggtgacaaatccgtaaagcaggtaaactgtgaaaggtgggatgcaatctacttcgatgtgagcgaccgcagccaatgtagagcacgcacagaaaagcgcaacaagggtcaataa

SEQ ID NO: 838 - DNA, 306 bp, Adenovirus C6
  MISC_FEATURE (1)..(306): C6.orf00019 E3 CR1-beta
atgaccggctcaaccatcgcgcccacaacggactatcgcaacaccactgctaccggactaaaatctgccctaaatttaccccaagttcatgcctttgtcaatgactgggcgagcttgggcatgtggtggttttccatagcgcttatgtttgtttgccttattattatgtggcttatttgttgcctaaagcgcagacgcgccagaccccccatctataggcctatcattgtgctcaacccacacaatgaaaaaattcatagattggacggtctcaaaccatgttctcttcttttacagtatgattaa

SEQ ID NO: 839 - DNA, 480 bp, Adenovirus C6
  MISC_FEATURE (1)..(480): C6.orf00020 19K protein
atgaggtacatgattttaggcttgctcgcccttgcggcagtctgcagcgctgccaaaaaggttgagtttaaggaaccagcttgcaatgttacatttaaatcagaagctaatgaatgcactactcttataaaatgcaccacagaacatgaaaagcttattattcgccacaaagacaaaattggcaagtatgctgtatatgctatttggcagccaggtgacactaacgactataatgtcacagtcttccaaggtgaaaatcgtaaaacttttatgtataaatttccattttatgaaatgtgcgatattaccatgtacatgagcaaacagtacaagttgtggcccccacaaaagtgtttagagaacactggcaccttttgttccaccgctctgcttattacagcgcttgctttggtatgtaccttactttatctcaaatacaaaagcagacgcagttttattgatgaaaagaaaatgccttga

SEQ ID NO: 840 - DNA, 324 bp, Adenovirus C6
  MISC_FEATURE (1)..(324): C6.orf00023 E3 CR1-alpha
gtgctgagtataataaatacagaaattagaatctactggggctcctgtcgccatcctgtgaacgccaccgtttttacccacccaaagcagaccaaagcaaacctcacctccggtttgcacaagcgggccaataagtaccttacctggtactttaacggctcttcatttgtaatttacaacagtttccagcgagacgaagtaagtttgccacacaaccttctcggcttcaactacaccgtcaagaaaaacaccaccaccaccctcctcacctgccgggaacgtacgagtgcgtcaccggttgctgcgcccacacctacagcctga

SEQ ID NO: 841 - DNA, 324 bp, Adenovirus C6
  MISC_FEATURE (1)..(324): C6.orf00024 E3 12.5 kDa immune modulating protein
atgaccagtggagaggcagagcaactgcgcctgacacacctcgaccactgccgccgccacaagtgctttgcccgcggctccggtgagttttgttactttgaattgcccgaagagcatatcgagggcccggcgcacggcgtccggctcaccacccaggtagagcttacacgtagcctgattcgggagtttaccaagcgccccctgctagtggagcgggagcggggtccctgtgttctgaccgtggtttgcaactgtcctaaccctggattacatcaagatctttgttgtcatctctgtgctgagtataataaatacagaaattag

SEQ ID NO: 842 - DNA, 684 bp, Adenovirus C6
  MISC_FEATURE (1)..(684): C6.orf00025 L4 VIII capsid protein
atgagcaaggaaattcccacgccctacatgtggagttaccagccacaaatgggacttgcggctggagctgcccaagactactcaacccgaataaactacatgagcgcgggaccccacatgatatcccgggtcaacggaatccgcgcccaccgaaaccgaattctcctcgaacaggcggctattaccaccacacctcgtaataaccttaatccccgtagttggcccgctgccctggtgtaccaggaaagtcccgctcccaccactgtggtacttcccagagacgcccaggccgaagttcagatgactaactcaggggcgcagcttgcgggcggctttcgtcacagggtgcggtcgcccgggcagggtataactcacctgaaaatcagagggcgaggtattcagctcaacgacgagtcggtgagctcctctcttggtctccgtccggacgggacatttcagatcggcggcgctggccgctcttcatttacgccccgtcaggcgatcctaactctgcagacctcgtcctcggagccgcgctccggaggcattggaactctacaatttattgaggagttcgtgccttcggtttacttcaaccccttttctggacctcccggccactacccggaccagtttattcccaactttgacgcggtaaaagactcggcggacggctacgactga

SEQ ID NO: 843 - DNA, 123 bp, Adenovirus C6
  MISC_FEATURE (1)..(123): C6.orf00026 22K protein
gtgctcctcctcctgctgctgccgccgctgtggatttcttgggctttgtcagagtcttgctatccggtcgcctttgcttctgcgtggccgctgctgttgctgccgctgccgccggtgcagtag

SEQ ID NO: 844 - DNA, 171 bp, Adenovirus C6
  MISC_FEATURE (1)..(171): C6.orf00028 22K protein
atgacggtagtaatgcaggatgttacgggggaaggccacgccgtgatggtagagaagaaagcggcgggcgaaggagatgttgcccccacagtcttgcaagcaagcaactatggcgttcttgtgcacgcgccacgagcggtagccttggcgctgttgttgctcttgggctaa

SEQ ID NO: 845 - DNA, 2421 bp, Adenovirus C6
  MISC_FEATURE (1)..(2421): C6.orf00030 100K protein
atggagtcagtcgagaaggaggacagcctaaccgccccctttgagttcgccaccaccgcctccaccgatgccgccaacgcgcctaccaccttccccgtcgaggcacccccgcttgaggaggaggaagtgattatcgagcaggacccaggttttgtaagcgaagacgacgaagatcgctcagtaccaacagaggataaaaagcaagaccaggacgacgcagaggcaaacgaggaacaagtcgggcggggggaccaaaggcatggcgactacctagatgtgggagacgacgtgctgttgaagcatctgcagcgccagtgcgccattatctgcgacgcgttgcaagagcgcagcgatgtgcccctcgccatagcggatgtcagccttgcctacgaacgccacctgttctcaccgcgcgtaccccccaaacgccaagaaaacggcacatgcgagcccaacccgcgcctcaacttctaccccgtatttgccgtgccagaggtgcttgccacctatcacatctttttccaaaactgcaagatacccctatcctgccgtgccaaccgcagccgagcggacaagcagctggccttgcggcagggcgctgtcatacctgatatcgcctcgctcgacgaagtgccaaaaatctttgagggtcttggacgcgacgagaagcgcgcggcaaacgctctgcaacaagaaaacagcgaaaatgaaagtcactgtggagtgctggtggaacttgagggtgacaacgcgcgcctagccgtgctgaaacgcagcatcgaggtcacccactttgcctacccggcacttaacctaccccccaaggttatgagcacagtcatgagcgagctgatcgtgcgccgtgcacgacccctggagagggatgcaaacttgcaagaacaaaccgaggagggcctacccgcagttggcgatgagcagctggcgcgctggcttgagacgcgcgagcctgccgacttggaggagcgacgcaagctaatgatggccgcagtgcttgttaccgtggagcttgagtgcatgcagcggttctttgctgacccggagatgcagcgcaagctagaggaaacgttgcactacacctttcgccagggctacgtgcgccaggcctgcaaaatttccaacgtggagctctgcaacctggtctcctaccttggaattttgcacgaaaaccgccttgggcaaaacgtgcttcattccacgctcaagggcgaggcgcgccgcgactacgtccgcgactgcgtttacttatttctgtgctacacctggcaaacggccatgggcgtgtggcagcagtgcctggaggagcgcaacctgaaggagctgcagaagctgctaaagcaaaacttgaaggacctatggacggccttcaacgagcgctccgtggccgcgcacctggcggacattatcttccccgaacgcctgcttaaaaccctgcaacagggtctgccagacttcaccagtcaaagcatgttgcaaaactttaggaactttatcctagagcgttcaggaattctgcccgccacctgctgtgcgcttcctagcgactttgtgcccattaagtaccgtgaatgccctccgccgctttggggtcactgctaccttctgcagctagccaactaccttgcctaccactccgacatcatggaagacgtgagcggtgacggcctactggagtgtcactgtcgctgcaacctatgcaccccgcaccgctccctggtctgcaattcacaactgcttagcgaaagtcaaattatcggtacctttgagctgcagggtccctcgcctgacgaaaagtccgcggctccggggttgaaactcactccggggctgtggacgtcggcttaccttcgcaaatttgtacctgaggactaccacgcccacgagattaggttctacgaagaccaatcccgcccgccaaatgcggagcttaccgcctgcgtcattacccagggccacatccttggccaattgcaagccattaacaaagcccgccaagagtttctgctacgaaagggacggggggtttacttggacccccagtccggcgaggagctcaacccaatccccccgccgccgcagccctatcagcagccgcgggcccttgcttcccaggatggcacccaaaaagaagctgcagctgccgccgccgccacccacggacgaggaggaatactgggacagtcaggcagaggaggttttggacgaggaggaggagatgatggaagactgggacagcctagacgaggaagcttccgaggccgaagaggtgtcagacgaaacaccgtcaccctcggtcgcattcccctcgccggcgccccagaaatcggcaaccgttcccagcattgctacaacctccgctcctcaggcgccgccggcactgcccgttcgccgacccaaccgtag

SEQ ID NO: 846 - DNA, 1590 bp, Adenovirus C6
  MISC_FEATURE (1)..(1590): C6.orf00031 DBP DNA binding protein
atggccagtcgggaagaggagcagcgcgaaaccacccccgagcgcggacgcggtgcggcgcgacgtccaccaaccatggaggacgtctcgtccccgtcgccgtcgccgccgcctccccgcgcgcccccaaaaaagcggctgaggcggcgtctcgagtccgaggacgaagaagactcgtcacaagatgcgctggtgccgcgcacacccagcccgcggccatcgacctcgacggcggatttggccattgcgtccaaaaagaaaaagaagcgcccctctcccaagcccgagcgcccgccatccccagaggtgatcgtggacagcgaggaagaaagagaagatgtggcgctacaaatggtgggtttcagcaacccaccggtgctaatcaagcacggcaagggaggtaagcgcacggtgcggcggctgaatgaagacgacccagtggcgcggggtatgcggatgcaagaggaaaaggaagagtccagtgaagcggaaagtgaaagcacggtgataaacccgctgagcctgccgatcgtgtctgcgtgggagaagggcatggaggctgcgcgcgcgttgatggacaagtaccacgtggataacgatctaaaggcaaacttcaagctactgcctgaccaagtggaagctctggcggccgtatgcaagacctggctaaacgaggagcaccgcgggttgcagctgaccttcaccagcaacaagacctttgtgacgatgatggggcgattcctgcaggcgtacctgcagtcgtttgcagaggtaacctacaagcaccacgagcccacgggctgcgcgttgtggctgcaccgctgcgctgagatcgaaggcgagcttaagtgtctacacgggagcattatgataaataaggagcacgtgattgaaatggatgtgacgagcgaaaacgggcagcgcgcgctgaaggagcagtctagcaaggccaagatcgtgaagaaccggtggggccgaaatgtggtgcagatctccaacaccgacgcaaggtgctgcgtgcatgacgcggcctgtccggccaatcagttttccggcaagtcttgcggcatgttcttctctgaaggcgcaaaggctcaggtggcttttaagcagatcaaggctttcatgcaggcgctgtatcctaacgcccagactgggcacggtcaccttctgatgccactacggtgcgagtgcaactcaaagcctgggcatgcaccctttttgggaaggcagctaccaaagttgactccgttcgccctgagcaacgcggaggacctggacgcggatctgatctccgacaagagcgtgctggccagcgtgcaccacccggcgctgatagtgttccagtgctgtaaccctgtgtatcgcaactcgcgcgcgcagggcggaggccccaactgcgacttcaagatatcggcgcccgacctgctaaacgcgttggtgatggtgcgcagcctgtggagtgaaaacttcaccgagctgccgcggatggttgtgcctgagtttaagtggagcactaaacaccagtatcgcaacgtgtccctgccagtggcgcatagcgatgcgcggcagaacccctttgatttttaa

SEQ ID NO: 847 - DNA, 630 bp, Adenovirus C6
  MISC_FEATURE (1)..(630): C6.orf00033 L3 protease
atgggctccagtgagcaggaactgaaagccattgtcaaagatcttggttgtgggccatattttttgggcacctatgacaagcgcttcccaggctttgtttccccacacaagctcgcctgcgccatagttaacacggccggtcgcgagactgggggcgtacactggatggcctttgcctggaacccgcgctcaaaaacatgctacctctttgagccctttggcttttctgaccaacgtctcaagcaggtttaccagtttgagtacgagtcactcctgcgccgtagcgccattgcctcttcccccgaccgctgtataacgctggaaaagtccacccaaagcgtgcaggggcccaactcggccgcctgtggcctattctgctgcatgtttctccacgcctttgccaactggccccaaactcccatggatcacaaccccaccatgaaccttattaccggggtacccaactccatgcttaacagtccccaggtacagcccaccctgcgccgcaaccaggaacagctctacagcttcctggagcgccactcgccctacttccgcagccacagtgcgcaaattaggagcgccacttctttttgtcacttgaaaaaacatgtaaaaataatgtactag

SEQ ID NO: 848 - DNA, 2892 bp, Adenovirus C6; identical to SEQ ID NO: 205
  MISC_FEATURE (1)..(2892): C6.orf00035 L3 hexon

SEQ ID NO: 849 - DNA, 753 bp, Adenovirus C6
  MISC_FEATURE (1)..(753): C6.orf00036 pVI hexon-associated protein 27 kDa
atggaagacatcaactttgcgtcactggccccgcgacacggctcgcgcccgttcatgggaaactggcaagatatcggcaccagcaatatgagcggtggcgccttcagctggggctcgctgtggagcggcattaaaaatttcggttccgccgttaagaactatggcagcaaagcctggaacagcagcacaggccagatgctgagggacaagttgaaagagcaaaatttccaacaaaaggtggtagatggcctggcctctggcattagcggggtggtggacctggccaaccaggcagtgcaaaataagattaacagtaagcttgatccccgccctcccgtagaggagcctccaccggccgtggagacagtgtctccagaggggcgtggcgaaaagcgtccgcgacccgacagggaagaaactctggtgacgcaaatagacgagcctccctcgtacgaggaggcactaaagcaaggcctgcccaccacccgtcccatcgcgcccatggctaccggagtgctgggccagcacacacccgtaacgctggacctgcctccccccgccgacacccagcagaaacctgtgctgccaggcccgtccgccgttgttgtaacccgtcctagccgcgcgtccctgcgccgcgccgccagcggtccgcgatcgttgcggcccgtagccagtggcaactggcaaagcacactgaacagcatcgtgggtttgggggtgcaatccctgaagcgccgacgatgcttctga

SEQ ID NO: 850 - DNA, 243 bp, Adenovirus C6; identical to SEQ ID NO: 736
  MISC_FEATURE (1)..(243): C6.orf00038 L2 X core protein

SEQ ID NO: 851 - DNA, 1143 bp, Adenovirus C6
  MISC_FEATURE (1)..(1143): C6.orf00039 pV
atgtatccagcggcggcggcgcgcatcgaagctatgtccaagcgcaaaatcaaagaagagatgctccaggtcatcgcgccggagatctatggccccccgaagaaggaagagcaggattacaagccccgaaagctaaagcgggtcaaaaagaaaaagaaagatgatgatgatgatgaacttgacgacgaggtggaactgttgcacgcgaccgcgcccaggcgacgggtacagtggaaaggtcgacgcgtaagacgtgttttgcgacccggcaccaccgtagtctttacgcccggtgagcgctccacccgcacctacaagcgcgtgtatgatgaggtgtacggcgacgaggacctgcttgagcaggccaacgagcgcctcggggagtttgcctacggaaagcggcataaggacatgctggcgttgccgctggacgagggcaacccaacacctagcctaaagcccgtgacactgcagcaggtgctgcccgcgcttgcaccgtccgaagaaaagcgcggcctaaagcgcgagtctggtgacttggcacccaccgtgcagctgatggtacccaagcgtcagcgactggaagatgtcttggaaaaaatgaccgtggagcctgggctggagcccgaggtccgcgtgcggccaatcaagcaggtggcaccgggactgggcgtgcagaccgtggacgttcagatacccaccaccagtagcactagtattgccactgccacagagggcatggagacacaaacgtccccggttgcctcggcggtggcagatgccgcggtgcaggcggccgctgcggccgcgtccaagacctctacggaggtgcaaacggacccgtggatgtttcgtgtttcagccccccggcgtccgcgccgttcaaggaagtacggcgccgccagcgcgctactgcccgaatatgccctacatccttccatcgcgcctacccccggctatcgtggctacacctaccgccccagaagacgagcaactacccgacgccgaaccaccactggaacccgccgccgccgtcgccgtcgccagcccgtgctggccccgatttccgtgcgcagggtggctcgcgaaggaggcaggaccctggtgctgccaacagcgcgctaccaccccagcatcgtttaa

SEQ ID NO: 852 - DNA, 597 bp, Adenovirus C6
  MISC_FEATURE (1)..(597): C6.orf00040 L2 VII core protein
atgtccatccttatatcgcccagcaataacacaggctggggcctgcgcttcccaagcaagatgtttggcggggccaagaagcgctccgaccaacacccagtgcgcgtgcgcgggcactaccgcgcgccctggggcgcgcacaaacgcggccgcactgggcgcaccaccgtcgatgacgccatcgacgcggtggtggaggaggcgcgcaactacacgcccacgccgccgccagtgtccaccgtggacgcggccattcagaccgtggtgcgcggagcccggcgctacgctaaaatgaagagacggcggaggcgcgtagcacgtcgccaccgccgccgacccggcactgccgcccaacgcgcggcggcggccctgcttaaccgcgcacgtcgcaccggccgacgggcggccatgcgagccgctcgaaggctggccgcgggtattgtcactgtgccccccaggtccaggcgacgagcggccgccgcagcagccgcggccattagtgctatgactcagggtcgcaggggcaacgtgtactgggtgcgcgactcggttagcggcctgcgcgtgcccgtgcgcacccgccccccgcgcaactag

SEQ ID NO: 853 - DNA, 1710 bp, Adenovirus C6
  MISC_FEATURE (1)..(1710): C6.orf00043 pIII
atgtatgaggaaggtcctcctccctcctacgagagcgtggtgagcgcggcgccagtggcggcggcgctgggttcacccttcgatgctcccctggacccgccgttcgtgcctccgcggtacctgcggcctaccggggggagaaacagcatccgttactctgagttggcacccctattcgacaccacccgtgtgtaccttgtggacaacaagtcaacggatgtggcatccctgaactaccagaacgaccacagcaactttctaaccacggtcattcaaaacaatgactacagcccgggggaggcaagcacacagaccatcaatcttgacgaccggtcgcactggggcggcgacctgaaaaccatcctgcataccaacatgccaaatgtgaacgagttcatgtttaccaataagtttaaggcgcgggtgatggtgtcgcgctcgcttactaaggacaaacaggtggagctgaaatacgagtgggtggagttcacgctgcccgagggcaactactccgagaccatgaccatagaccttatgaacaacgcgatcgtggagcactacttgaaagtgggcaggcagaacggggttctggaaagcgacatcggggtaaagtttgacacccgcaacttcagactggggtttgacccagtcactggtcttgtcatgcctggggtatatacaaacgaagccttccatccagacatcattttgctgccaggatgcggggtggacttcacccacagccgcctgagcaacttgttgggcatccgcaagcggcaacccttccaggagggctttaggatcacctacgatgacctggagggtggtaacattcccgcactgttggatgtggacgcctaccaggcaagcttgaaagatgacaccgaacagggcgggggtggcgcaggcggcggcaacaacagtggcagcggcgcggaagagaactccaacgcggcagctgcggcaatgcagccggtggaggacatgaacgatcatgccattcgcggcgacacctttgccacacgggcggaggagaagcgcgctgaggccgaggcagcggccgaagctgccgcccccgctgcggaggctgcacaacccgaggtcgagaagcctcagaagaaaccggtgattaaacccctgacagaggacagcaagaaacgcagttacaacctaataagcaatgacagcaccttcacccagtaccgcagctggtaccttgcatacaactacggcgaccctcaggccgggatccgctcatggaccctgctttgcactcctgacgtaacctgcggctcggagcaggtatactggtcgttgcccgacatgatgcaagaccccgtgaccttccgctccacgcgccagatcagcaactttccggtggtgggcgccgagctgttgcccgtgcactccaagagcttctacaacgaccaggccgtctactcccagctcatccgccagtttacctctctgacccacgtgttcaatcgctttcccgagaaccagattttggcgcgcccgccagcccccaccatcaccaccgtcagtgaaaacgttcctgctctcacagatcacgggacgctaccgctgcgcaacagcatcggaggagtccagcgagtgaccattactgacgccagacgccgcacctgcccctacgtttacaaggccctgggcatagtctcgccgcgcgtcctatcgagccgcactttttga

SEQ ID NO: 854 - DNA, 1758 bp, Adenovirus C6
  MISC_FEATURE (1)..(1758): C6.orf00044 pIIIa
atgatgcaagacgcaacggacccggcggtgcgggcggcgctgcagagccagccgtccggccttaactccacggacgactggcgccaggtcatggaccgcatcatgtcgctgactgcgcgcaaccctgacgcgttccggcagcagccgcaggccaaccggctctccgcaattctggaagcggtggtcccggcgcgcgcaaaccccacgcacgagaaggtgctggcgatcgtaaacgcgctggccgaaaacagggccatccggcccgatgaggccggcctggtctacgacgcgctgcttcagcgcgtggctcgttacaacagcagcaacgtgcagaccaacctggaccggctggtgggggatgtgcgcgaggccgtggcgcagcgtgagcgcgcgcagcagcagggcaacctgggctccatggttgcactaaacgccttcctgagtacacagcccgccaacgtgccgcggggacaggaggactacaccaactttgtgagcgcactgcggctaatggtgactgagacaccgcaaagtgaggtgtatcagtccgggccagactattttttccagaccagtagacaaggcctgcagaccgtaaacctgagccaggctttcaagaacttgcaggggctgtggggggtgcgggctcccacaggcgaccgcgcgaccgtgtctagcttgctgacgcccaactcgcgcctgttgctgctgctaatagcgcccttcacggacagtggcagcgtgtcccgggacacatacctaggtcacttgctgacactgtaccgcgaggccataggtcaggcgcatgtggacgagcatactttccaggagattacaagtgttagccgcgcgctggggcaggaggacacgggcagcctggaggcaaccctgaactacctgctgaccaaccggcggcaaaaaatcccctcgttgcacagtttaaacagcgaggaggagcgcattttgcgctatgtgcagcagagcgtgagccttaacctgatgcgcgacggggtaacgcccagcgtggcgctggacatgaccgcgcgcaacatggaaccgggcatgtatgcctcaaaccggccgtttatcaatcgcctaatggactacttgcatcgcgcggccgccgtgaaccccgagtatttcaccaatgccatcttgaacccgcactggctaccgccccctggtttctacaccgggggattcgaggtgcccgagggtaacgatggattcctctgggacgacatagacgacagcgtgttttccccgcaaccgcagaccctgctagagttgcaacaacgcgagcaggcagaggcggcgctgcgaaaggaaagcttccgcaggccaagcagcttgtccgatctaggcgctgcggccccgcggtcagatgctagtagcccatttccaagcttgatagggtctcttaccagcactcgcaccacccgcccgcgcctgctgggcgaggaggagtacctaaacaactcgctgctgcagccgcagcgcgaaaagaacctgcctccggcgtttcccaacaacgggatagagagcctagtggacaagatgagtagatggaagacgtatgcgcaggagcacagggatgtgcccggcccgcgcccgcccacccgtcgtcaaaggcacgaccgtcagcggggtctggtgtgggaggacgatgactcggcagacgacagcagcgtcttggatttgggagggagtggcaacccgtttgcacaccttcgccccaggctggggagaatgttttaa

SEQ ID NO: 855 - DNA, 1248 bp, Adenovirus C6
  MISC_FEATURE (1)..(1248): C6.orf00045 52K protein
atgcatccggtgctgcggcagatgcgcccccctcctcagcagcggcaagagcaagagcagcggcagacatgcagggcaccctccccttctcctaccgcgtcaggaggggcaacatccgcggctgacgcggcggcagatggtgattacgaacccccgcggcgccggacccggcactacttggacttggaggagggcgagggcctggcgcggctaggagcgccctctcctgagcgacacccaagggtgcagctgaagcgtgacacgcgcgaggcgtacgtgccgcggcagaacctgtttcgcgaccgcgagggagaggagcccgaggagatgcgggatcgaaagttccatgcagggcgcgagttgcggcatggcctgaaccgcgagcggttgctgcgcgaggaggactttgagcccgacgcgcggaccgggattagtcccgcgcgcgcacacgtggcggccgccgacctggtaaccgcgtacgagcagacggtgaaccaggagattaactttcaaaaaagctttaacaaccacgtgcgcacgcttgtggcgcgcgaggaggtggctataggactgatgcatctgtgggactttgtaagcgcgctggagcaaaacccaaatagcaagccgctcatggcgcagctgttccttatagtgcagcacagcagggacaacgaggcattcagggatgcgctgctaaacatagtagagcccgagggccgctggctgctcgatttgataaacattctgcagagcatagtggtgcaggagcgcagcttgagcctggctgacaaggtggccgccattaactattccatgctcagtctgggcaagttttacgcccgcaagatataccataccccttacgttcccatagacaaggaggtaaagatcgaggggttctacatgcgcatggcgctgaaggtgcttaccttgagcgacgacctgggcgtttatcgcaacgagcgcatccacaaggccgtgagcgtgagccggcggcgcgagctcagcgaccgcgagctgatgcacagcctgcaaagggccctggctggcacgggcagcggcgatagagaggccgagtcctactttgacgcgggcgctgacctgcgctgggccccaagccgacgcgccctggaggcagctggggccggacctgggctggcggtggcacccgcgcgcgctggcaacgtcggcggcgtggaggaatatgacgaggacgatgagtacgagccagaggacggcgagtactaa

SEQ ID NO: 856 - DNA, 117 bp, Artificial Sequence
  C6.orf00046 hypothetical protein
atgctttcgctttccagcctaaccgcttacgccgcgcgcggccagtggccaaaaaagctagcgcagcatccgccgcgcctggaaggaagccaaaaggagcgctcccccgttgtctga

SEQ ID NO: 857 - DNA, 1962 bp, Adenovirus C6
  MISC_FEATURE (1)..(1962): C6.orf00052 pTP
atggagcactttttgccgctgcgcaacatctggaaccgcgtccgtgactttccgcgcgcctccaccaccgccgccggcatcacctggatgtccaggtacatctacggatatcatcgccttatgttggaagacctcgcccccggagccccggccaccctacgctggcccctctaccgccagccgccgccgcactttttggtgggataccagtacctggtgcggacttgcaacgactacgtctttgactcaagggcttactcgcgtctcaggtacaccgagctctcgcagccgggtcaccagaccgttaactggtccgttatggccaactgcacttacaccatcaacacgggcgcataccaccgctttgtggacatggacgacttccagtctaccctcacgcaggtgcagcaggccatattagccgagcgcgttgtcgccgacctggccctgcttcagccgatgaggggcttcggggtcacacgcatgggaggaagagggcgccacctacggccaaactccgccgccgccgcagcgatagatgcaagagatgcaggacaagaggaaggagaagaagaagtgccggtagaaaggctcatgcaagactactacaaagacctgcgccgatgtcaaaacgaagcctggggcatggccgaccgcctgcgcattcagcaggccggacccaaggacatggtgcttctgtcgaccatccgccgtctcaagaccgcctactttaattacatcatcagcagcacctccgccagaaacaaccccgaccgccgcccgctgccgcccgccacggtgctcagcctaccttgcgactgtgactggttagacgcctttctcgagaggttttccgatccggtcgatgcggactcgctcaggtccctcggtggcggagtacctacacaacaattgttgagatgcatcgttagcgccgtatccctgccgcacggcagccccccgccaacccataaccgggacatgacgggcggcgtcttccaactgcgcccccgcgagaacggccgcgccgtcaccgagaccatgcgccgtcgccgcggggagatgatcgagcgctttgtcgaccgcctcccggtgcgccgtcgtcgccgccgtgtcccccctcccccaccgccgccagaagaagaagaaggggaggcccttatggaagaggagattgaagaagaagaagaggcccctgtagcctttgagcgcgaggtgcgcgacactgtcgccgagctcatccgtcttctggaggaggagttaaccgtgtcggcgcgcaactcccagtttttcaacttcgccgtggacttctacgaggccatggagcgccttgaggccttgggggatatcaacgaatccacgttgcggcgctgggttatgtacttcttcgtggcagaacacaccgccaccaccctcaactacctctttcagcgcctgcgaaactacgccgtcttcgcccggcacgtggagctcaatctcgcgcaggtggtcatgcgcgcccgcgatgccgaagggggcgtggtctacagccgcgtctggaacgagggaggcctcaacgccttctcgcagctcatggcccgcatctccaacgacctcgccgccaccgtggagcgagccggacgcggagatctccaggaggaagagatcgagcagttcatggccgagatcgcctatcaagacaactcaggagacgtgcaggagattttgcgccaggccgccgtcaacgacaccgaaattgattctgtcgaactctctttcaggttcaagctcaccgggcccgtcgtcttcacgcagaggcgccagattcaggagatcaaccgccgcgtcgtcgcgttcgccagcaacctccgcgcgcagcaccagctcctgcccgcgcgcggcgccgacgtgcccctgccccctctcccggcgggtcccgagccccccctacctccgggggcccgcccgcgtcaccgcttttag

SEQ ID NO: 858 - DNA, 3309 bp, Adenovirus C6
  MISC_FEATURE (1)..(3309): C6.orf00054 E2B DNA polymerase
ttgcaagccatcgacgccgccaccaaccagcccctggaaatcaggtatcacctggacctagcccgcgccctgacccggctatgcgaggtaaacctgcaggagctcccgcctgacctgacgccgcgggagctccagaccatggacagctcccatctgcgcgatgttgtcatcaagctccgaccgccgcgcgcggacatctggactttgggctcgcgcggcgtggtggtccgatccaccgtaactcccctcgagcagccagacggtcaaggacaagcagccgaagtagaagaccaccagccaaacccgccaggcgaggggctcaaattcccactctgcttccttgtgcgcggtcgtcaggtcaacctcgtgcaggatgtacagcccgtgcaccgctgccagtactgcgcacgtttttacaaaagccagcacgagtgttcggcccgtcgcagggacttctactttcaccacatcaacagccactcctccaactggtggcgggagatccagttcttcccgatcggctcgcatcctcgcaccgagcgtctctttgtcacctacgatgtagagacctatacttggatgggggcctttgggaagcagctcgtgcccttcatgctggtcatgaagttcggcggagatgagcctctagtgaccgccgcgcgagacctagccgcggaccttggatgggaccgctgggaacaagacccgcttaccttctactgcatcaccccagaaaaaatggccataggtcgccagtttaggacctttcgcgaccacctgcaaatgctaatggcccgtgacctgtggagctcattcgtcgcttccaaccctcatcttgcagactgggccctttcagagcacgggctcagctcccctgaagagctcacctacgaggaacttaaaaaattgccttccatcaagggcatcccgcgcttcttggaactttacattgtgggccacaacatcaacggctttgacgagatcgtgctcgccgcccaggtaattaacaaccgttccgaggtgccgggacccttccgcatcacacgcaactttatgcctcgcgcgggaaagatactcttcaacgatgtcaccttcgccctgccaaacccgcgttccaaaaagcgcacggactttttgctctgggagcagggcggatgcgacgacactgacttcaaataccagtacctcaaagtcatggttagggacacctttgcgctcacccacacctcgctccggaaggccgcgcaggcatacgcgctacccgtagaaaagggatgctgcgcctaccaggccgtcaaccagttctacatgctaggctcttaccgttcggaggccgacgggtttccgatccaagagtactggaaagaccgcgaagagtttgtcctcaaccgcgagctgtggaaaaaaaagggacaggataagtatgacatcatcaaggaaaccctggactactgcgccctagacgtgcaggtcaccgccgagctggtcaacaagctgcgcgactcctacgcctccttcgtgcgtgacgcggtaggtctcacagacgccagcttcaacgtcttccagcgtccaaccatatcatccaactcacatgccatcttcaggcagatagtcttccgagcagagcagcccgcccgtagcaacctcggtcccgacctcctcgctccctcgcacgaactatacgattacgtgcgcgccagcatccgcggtggaagatgctaccctacatatcttggaatactcagagagcccctctacgtttacgacatttgcggcatgtacgcctccgcgctcacccaccccatgccatggggtcccccactcaacccatacgagcgcgcgcttgccgcccgcgcatggcagcaggcgctagacttgcaaggatgcaagatagactacttcgacgcgcgcctgctgcccggggtctttaccgtggacgcagaccccccggacgagacgcagctagacccactaccgccattctgctcgcgcaagggcggccgcctctgctggaccaacgagcgcctacgcggagaggtagccaccagcgttgaccttgtcaccctgcacaaccgcggttggcgcgtgcacctagtgcccgacgagcgcaccaccgtctttcccgaatggcggtgcgttgcgcgcgaatacgtgcagctaaacatcgcggccaaggagcgcgccgatcgcgacaaaaaccaaaccctgcgctccatcgccaagttgctgtccaacgccctctacgggtcgtttgccaccaagcttgacaacaaaaagattgtcttttctgaccagatggacgcggccaccctcaaaggcatcaccgcgggccaggtgaatatcaaatcctcctcgtttttggaaactgacaatcttagcgcagaagtcatgcccgcttttgagagggagtactcaccccaacagctggccctcgcagacagcgatgcggaagagagtgaggacgaacgcgcccccacccccttttatagccccccttcaggaacacccggtcacgtggcctacacctataaaccaatcaccttccttgatgccgaagagggcgacatgtgtcttcacaccctggagcgagtggaccccctagtggacaacgaccgctacccctcccacttagcctccttcgtgctggcctggacgcgagccttcgtctcagagtggtccgagtttctatacgaggaggaccgcggaacaccgctcgaggacaggcctctcaagtctgtatacggggacacggacagccttttcgtcaccgagcgtggacaccggctcatggaaaccagaggtaagaaacgcatcaaaaagcatgggggaaacctggtttttgaccccgaacggccagagctcacctggctcgtggaatgcgagaccgtctgcggggcctgcggcgcggatgcctactccccggaatcggtatttctcgcgcccaagctctacgcccttaaaagtctgcactgcccctcgtgcggcgcctcctccaagggcaagctgcgcgccaagggccacgccgcggaggggctggactatgacaccatggtcaaatgctacctggccgacgcgcagggcgaagaccggcagcgcttcagcaccagcaggaccagcctcaagcgcaccctggccagcgcgcaacccggagcgcaccccttcaccgtgacccagactacgctgacgaggaccctgcgcccgtggaaagacatgaccctggcccgtctggacgagcaccgactactgccgtacagcgaaagccgccccaacccgcgaaacgaggagatatgctggatcgagatgccgtag

SEQ ID NO: 859 - DNA, 1128 bp, Adenovirus C6
  MISC_FEATURE (1)..(1128): C6.orf00055 IVa2 pIVa2
atgctggatcgagatgccgtagagcacgtgaccgagctgtgggaccgcctggaactgcttggtcaaacgctcaaaagcatgcctacggcggacggcctcaaaccgttgaaaaactttgcttccttgcaagaactgctatcgctgggcggcgagcgccttctggcggatttggtcagggaaaacatgcaagtcagggacatgcttaacgaagtggcccccctgctcagggatgacggcagctgcagctctcttaactaccagttgcagccggtaataggtgtgatttacgggcccaccggctgcggtaagtcgcagctgcttaggaacctgctttcttcccagctgatctcccctaccccggaaacggttttcttcatcgccccgcaggtagacatgatccccccatctgaactcaaagcgtgggaaatgcaaatctgtgagggtaactacgcccctgggccggatggaaccattataccgcagtctggcaccctccgcccgcgctttgtaaaaatggcctatgacgatctcatcctggaacacaactatgacgttagtgatcccagaaatatcttcgcccaggccgccgcccgtgggcccattgccatcattatggacgaatgcatggaaaatcttggaggtcacaagggcgtctccaagttcttccacgcatttccttctaagctacatgacaaatttcccaagtgcaccggatacactgtgctggtggttctgcacaacatgaatccccggagggatatggctgggaacatagccaacctaaaaatacagtccaagatgcatctcatatccccacgtatgcacccatcccagcttaaccgctttgtaaacacttacaccaagggcctgcccctggcaatcagcttgctactgaaagacatttttaggcaccacgcccagcgctcctgctacgactggatcatctacaacaccaccccgcagcatgaagctctgcagtggtgctacctccaccccagagacgggcttatgcccatgtatctgaacatccagagtcacctttaccacgtcctggaaaaaatacacaggaccctcaacgaccgagaccgctggtcccgggcctaccgcgcgcgcaaaacccctaaataa

SEQ ID NO: 860 - DNA, 423 bp, Adenovirus C6; identical to SEQ ID NO: 784
  MISC_FEATURE (1)..(423): C6.orf00056 pIX

SEQ ID NO: 861 - DNA, 1302 bp, Adenovirus C6
  MISC_FEATURE (1)..(1302): C6.orf00058 E1B large T antigen
atggaacccgagagccggcctggaccctcgggaatgaatgttgtacaggtggctgaactgtttccagaactgagacgcattttaaccattaacgaggatgggcaggggctaaagggggtaaagagggagcggggggcttctgaggctacagaggaggctaggaatctaacttttagcttaatgaccagacaccgtcctgagtgtgttacttttcagcagattaaggataattgcgctaatgagcttgatctgctggcgcagaagtattccatagagcagctgaccacttactggctgcagccaggggatgattttgaggaggctattagggtatatgcaaaggtggcacttaggccagattgcaagtacaagattagcaaacttgtaaatatcaggaattgttgctacatttctgggaacggggccgaggtggagatagatacggaggatagggtggcctttagatgtagcatgataaatatgtggccgggggtgcttggcatggacggggtggttattatgaatgtgaggtttactggtcccaattttagcggtacggttttcctggccaataccaatcttatcctacacggtgtaagcttctatgggtttaacaatacctgtgtggaagcctggaccgatgtaagggttcggggctgtgccttttactgctgctggaagggggtggtgtgtcgccccaaaagcagggcttcaattaagaaatgcctgtttgaaaggtgtaccttgggtatcctgtctgagggtaactccagggtgcgccacaatgtggcctccgactgtggttgctttatgctagtgaaaagcgtggctgtgattaagcataacatggtgtgtggcaactgcgaggacagggcctctcagatgctgacctgctcggacggcaactgtcacttgctgaagaccattcacgtagccagccactctcgcaaggcctggccagtgtttgagcacaacatactgacccgctgttccttgcatttgggtaacaggaggggggtgttcctaccttaccaatgcaatttgagtcacactaagatattgcttgagcccgagagcatgtccaaggtgaacctgaacggggtgtttgacatgaccatgaagatctggaaggtgctgaggtacgatgagacccgcaccaggtgcagaccctgcgagtgtggcggtaaacatattaggaaccagcctgtgatgctggatgtgaccgaggagctgaggcccgatcacttggtgctggcctgcacccgcgctgagtttggctctagcgatgaagatacagattga

SEQ ID NO: 862 - DNA, 528 bp, Adenovirus C6; identical to SEQ ID NO: 786
  MISC_FEATURE (1)..(528): C6.orf00059 E1B 19K protein

SEQ ID NO: 863 - DNA, 312 bp, Adenovirus C6; identical to SEQ ID NO: 787
  MISC_FEATURE (1)..(312): C6.orf00060 E1A 26 kDa protein

SEQ ID NO: 864 - DNA, 519 bp, Adenovirus C6
  MISC_FEATURE (1)..(519): C6.orf00061 E1A
atggccgccagtcttttggaccagctgatcgaagaggtactggctgataatcttccacctcctagccattttgaaccacctacccttcacgaactgtatgatttagacgtgacggcccccgaagatcccaacgaggaggcggtttcgcagatttttcccgagtctgtaatgttggcggtgcaggaagggattgacttattcacttttccgccggcgcccggttctccggagccgcctcacctttcccggcagcccgagcagccggagcagagagccttgggtccggtttctatgccaaaccttgtgccggaggtgatcgatcttacctgccacgaggctggctttccacccagtgacgacgaggatgaagagggtgaggagtttgtgttagattatgtggagcaccccgggcacggttgcaggtcttgtcattatcaccggaggaatacgggggacccagatattatgtgttcgctttgctatatgaggacctgtggcatgtttgtctacagtaagtga

SEQ ID NO: 865 - DNA, 378 bp, Adenovirus D8
  MISC_FEATURE (1)..(378): D8.orf00002 E4 ORF1 protein
atggctgaatgtctctatgcttttatagatagccctggagggatggctcccgtccaggaaggggctagcaataaatatacctttttttgtcctgaatctttttatatttttccgcatggggtggtattggtttacctaaaagtcagtgtactcgttcctactggttatcagggcacatttatggctttaaatgactaccatgccaggggcatactaacccagtccgatgtgatttttgccgggagaagacaggagcttgctgtactgctttttaatcacacggaccaatttttgtatgtccgcaagggccacccagtgggcaccctgctgctaaaaaaagtaatttttccttcagtaaaaatagccaccttggtttag

SEQ ID NO: 866 - DNA, 393 bp, Adenovirus D8
  MISC_FEATURE (1)..(393): D8.orf00003 E4 ORF2 protein
atgcttcagcgacgcggtgtaagctaccacattgtggtccctggggtcctagtgacgtatttagaggatttttctattactaacatgattaaagaaaaactacctcgctttattactcacattttggaaggcattaccggagatacaaaaagagcttattccagcatgcagtttttaggtgctagctttggagcattaaagtactcccttacgcttgccagtcccacgcttagccctggctctgaattgtcagctgtagtggcccaggacttaagtgactttttgcagctgacacttagacgtcagctaagggctgagggcagaaccttattaaatgttgttgttttaaacacgctgcaggtggtggagcagcaggatttgtttctattatga

SEQ ID NO: 867 - DNA, 354 bp, Adenovirus D8
  MISC_FEATURE (1)..(354): D8.orf00004 E4 ORF3 protein
atgaaggtctgcctgattatgaaagtggagggggcgctatgggagcttttccacatgtgcggagtggacttacaccaacaatttgtagaaataatccaaggctggaaaaatgagaattacctggggatggtgcaggaatgtaacatgatgattgatgaaatcgatggagggccggcttttaatgtgattcttatgctggatgtacgcgtagagccactgctcgaagccacagtcgagcaccttgaaaatagagtgggttttgacctggctgtatgtttccaccaacacagcggcggtgaacgctgtcacctgcgtgacttgcactttatcgtccttcgagaccgtttggaataa

SEQ ID NO: 868 - DNA, 879 bp, Adenovirus D8
  MISC_FEATURE (1)..(879): D8.orf00009 E4 control protein 34 kDa
atgagcaccaaggaacaatcaaccttgctccgccattatccatatcgcagggcccgtttaccacgatatgataaggagaccagggcctctttgactgaacaacaccctgtattgcccgattgtgatcatgcagattatcataatgtaagttctgtccgtggattaccatgtgctgctggttttaccctgctccaagagtttccagtcccctgggatatgatcctgacccgaaaggaaataaaaattttaaaaagatgtatgtcagtgtgcctgtgtcccgctaccctggatctggtaagagcccagatggtaagcgggtacgagcgctggatcctgcattgccactgtttatccccgggctccctgcagtgccgggcgggaggcaccctgctggccgtgtggtttaggagagtcatttacgggtgcatgttcaaccagcgcttcccctggtaccggcagattgtaaatagaaacatgtccaaagagattatgtatatgggcagtgtgtttataaggggcaggcacctgatatactgccgcatttggtacgatggtcacgtgggttccatcatttccaacataagctttggctggagcaccctaaattatgggctgctgaataacatggtcattatgtgctgcacttactgtgaaaacatgagcgagattaggatgcggtgctgtgcccgacgcaccagaagactaatgctaaaggctgtggggattatagtgaaagagacttgcgatcccgatcccatctgtagcagccgcaccgagccccggcggcagagactgttaagggcgctgatggagaggcacagacccattttgttttccgagtatgagtctgtgcgttcttctcattccaccagactgtga

SEQ ID NO: 869 - DNA, 246 bp, Adenovirus D8
  MISC_FEATURE (1)..(246): D8.orf00010 E4 ORF6/7 protein
gtgaccttggactgcgaggcccacttggatgatttttcaaaggacggcttcatctcaatcaccgacccccgtttggctcgccaggaaactgtgtggattataaaccccaagtccagttcccgcactaatgagaactttcccctatttaaggccacccgtgctgagagaattgtttacactgtaaaatgggctggtggtgggagaatgtgtacccgcgctggtgtaaaaatcaataaagatacatga

SEQ ID NO: 870 - DNA, 1089 bp, Adenovirus D8; identical to SEQ ID NO: 146
  MISC_FEATURE (1)..(1089): D8.orf00011 L5 fiber

SEQ ID NO: 871 - DNA, 150 bp, Adenovirus D8
  MISC_FEATURE (1)..(150): D8.orf00012 U protein
atgaaaattgtggaccaggaatttgacatccctttcaaggtgtggagaaagtttgccgcccgccggggactggagtaccagagctgggaggaggggactgaggtgctgctaaacaactacaccaaagacatactttcagattttaagtaa

SEQ ID NO: 872 - DNA, 318 bp, Adenovirus D8
  MISC_FEATURE (1)..(318): D8.orf00013 E3 CR1-alpha
gtgagtttaataaaagctgaaataagactctactctggaatccagtgtcgtcataatcgcaccgagaccattaactttaccacccaggaacaggtgaactttacctgcaaactccacaagaagtacctcatatggtttttcaacaacactactcttgcagtagttaacacctgtgacaacgacggtgttcttcttcccaacaatctcaccagtggactagccttctctgttaaaagggcaaagctaattcttcattgccctataactgatttaagcccaaaaaccaatcaaacccccttttcccatctacccaaataa

SEQ ID NO: 873 - DNA, 321 bp, Adenovirus D8
  MISC_FEATURE (1)..(321): D8.orf00014 E3 12.5 kDa immune modulating protein
atgtcctatggtgactcggctgagcttgctcggttaaggcatctggaccactgccgccgcctgcactgctttgcccgggagagctgcgggcttatctactttgagcttcccaaggagcaccccaacggccctgcacacggagtgcggattaccgtagagggcaccaccgagtctcacctggttaggttcttcacccagcaacccttcctggtcgagcgggaccgggctgcaaccacctacaccgtgtactgcatttgtccaaccccgaagttgcatgaaaatttttgctgtactctttgtggtgagtttaataaaagctga

SEQ ID NO: 874 - DNA, 684 bp, Adenovirus D8
  MISC_FEATURE (1)..(684): D8.orf00015 L4 VIII capsid protein
atgagcaaggagattcccacgccttacatgtggagctatcagccccagatgggcctagccgcgggcgcctcccaggactactccacccgcatgaactggctcagtgccgggccctcaatgatctcacaggtcaacgggatccgtaaccatcgaaaccagatattgttggagcaggcggcagtcacctccacgcccagggcaaagcttaacccgcgtaattggccctccaccctggtgtaccaggaaattcccgggccaactaccgtactacttccgcgtgacgcactggccgaagtccgcatgactaactcaggtgtccagctggccggcggcgcttcccggtgcccgctccgcccacaatcgggtataaaaaccctggtgatccgaggcaaaggcacacagcttaacgacgagttggtaagctctgcaatcggtctgcgacctgatggagtgtttcaactagccggagccgggaaatcgtcctttactcccaaccaggcctacctgaccttgcagagcagctcttcggagcctcgctccggaggcattggaaccctccagtttgtgcaggagtttgtgccctcggtctactttaaccccttctcgggatcgccaggcctttacccggacgagtttataccgaactttgacgcagtgagagaagcggtggacggctacgactaa

SEQ ID NO: 875 - DNA, 186 bp, Adenovirus D8
  MISC_FEATURE (1)..(186): D8.orf00016 L4 encapsidation protein
gtgaagggtgacggtaagcaccagcggcagggctaccgatcatggagggcccacaaagccgcgatcattgcctgcttgcaagactgcggggggaacattgcttttgcccgccgctacctgcttttccaccgcggggtaaacatcccccgcaacgtgttgcattactaccgtcaccttcacagctaa

SEQ ID NO: 876 - DNA, 2145 bp, Adenovirus D8
  MISC_FEATURE (1)..(2145): D8.orf00017 L4 hexon-assembly protein
atggaggagcagccgcgtaagcaggagcaggaggaggagaacttaaccacccacgagcaacccaaaattgagcaggacctgggcttggaagagccggctcgtctagaacccccacacgatgaacaggagaagaccaacgctgggctggagcatggctacctaggaggacaggaggatgtgctgctaaaacacttgcagcgccagtcctttatcctccgggacgctctggccgaccgaagcaaaacccccctcagcgtccaggagctgtgtcgggcctacgagctcaacctcttctcgccgcgcgtgccccccaaacgccagcccaacggcacctgcgagcccaacccgcgtcttaacttctaccccgtctttgcggtccccgaggcccttgccacttatcacatattttttaaaaaccaaaaaatccccgtttcctgccgcgccaaccgcacccgcgccgacgcactcctcgctctggggcccggcgcgcgcatacctgatatcgcttccctggaagaggtgcccaagatctttgaagggcttggtcgggacgagacgcgcgcggcgaacgctctaaaagaaacagcagaggaaaagggttacactagcgccctggtagagttggaaggcgataacgccaggctggccgtgcttaagcgcagcgtcgagcttacccatttcgcctaccctgccgttaacctcccgcccaaggtcatgcgtcgcatcatggatcagcttatcacgccccacattgaggcccttgatgaaagccaaaagcagcgccctgaggacgcccggcccgtggtcagcgacgaaatgcttgcgcgctggctcggaaaccgcgacccccagtccctggagcagcggcgtaagctcatgctggccgtggtcctggtcaccctcgagttggaatgcatgcgccgcttttttagcgaccccgaaaccctgcgcaaggttgaagagaccctgcactacactttcaggcacggctttgtcaggcaggcctgcaagatctctaacgtggagctaaccaacctggtctcctgcctgggtattttacacgagaaccgcctggggcagaccgtgcttcactcgaccctgaagggcgaggcgcggcgggactacatccgcgactgtgtctttctttttctttgccatacctggcagtcggccatgggcgtgtggcagcagtgtctccaggacgagaacctgaaggagctggacaagcttcttgctaaaaaccttaaaaagttatggacgggctttgacgagcgcaccgtcgcctcggacctggccgagattgtttttcctgaacgcctgaggcagacgcttaaaggcgggctgcccgactttatgagccagagcatgttgcaaaactaccgcactttcattctcgagcgatcgggaatcctgcccgccacctgcaacgccttcccctccgactttgtcccgctgagctaccgccagtgtcccccgccgctgtggagccactgctacctcttgcagctggccaactacatcgcccaccactcggacgtgatcgaggacgtaagcggcgaggggctgcttgagtgccactgccgctgcaacctgtgctccccgcaccgctccctggtctgcaacccccagctcctaagcgagacccaggtcatcggtacctttgagctgcaaggtccggaaaactccaccactccgctgaaacttacgccggggttgtggacttccgcgtacctgcgcaaatttgtaccccaggactaccacgcccacgagataaagttctttgaggaccaattgtgcccacagcacgcggatcttacggcctgcgtcatcacccagggcgcaatcctcgcccaattgcacgccatccaaaaatcccgccaagagtttcttctaaaaaagggtaaaggggtttacctggacccccagacaggcgaagtgcttaacccgggtcttccccagcatgccgaggaagaagcaggagccactagtggaggagatggaagaagaatgggacagccaggcagaggaggacgaatgggaggaggaggaggaagaattggaagaggtgcaacaggagcaggcaacagagcagcccgtcgccgcaccatccgcgccggcagcccctccggtcaagcctcctcgtag

SEQ ID NO: 877 - DNA, 1473 bp, Adenovirus D8
  MISC_FEATURE (1)..(1473): D8.orf00019 E2A ssDNA-binding protein
atggccggcggcagtcaggacgtgcgccggtttatggaccgagaggccactccgccccggggccacgggtcggcgcgctatccgccggagcaggaaaggagcccctcgccgccgctacctcctctgcccaccaagcgccgaaagtatcagcgggtgggctccgggtcttccgaggaggacgtggttccagtggacagccctccaaaaaagaagcagcccagaaagaccaaacatgtgaccaaggtaaaccccgacgaagagatgccccaggaagatgccgtgatcgtgggagtgggattcagccagccgccggttctgttgaaggaaggcaaggacggaaaacgcattgtcgagcccgcgacccctggtattttgaacgtgcgcaaccccctgagtctgcctttggtttcgtcctgggagaagggcatggataccataaacgtgctcatggaacgctaccgcgtcgacagcggcctgcgcaatgcttacaagcttatgccggagcagaccgagatattccaaaaaatgtgccagacctggatgaacgaggaggcccgcgggatgcaactgacctttaccacccagaagagctttagcaccgtgatgggtcgcctgttgcaaggttacatctttagccacagcgggatcgcgcacaaaaactgggagtgcaccggcagtgccctgtgggaccacggctgtgccgaggtggaaggccagcttaagtgtctgcacgggacggtaatgatccacaaggaccatgtggtggagatggatgtgaccagcgagaacggtcagcgcgcgttgaaggagcaacccagcaaggccaaagtgacccagaaccgctgggggagaagcgtggtgcaactgaccagccatgacgcgcgctgctgcgtgcaagatgccgggtgcggaaataaccagtttagcgggaaaagctgcggcctgttttttagcgagggagctaaggcccagcaagcttttaagcagattatggcctttgttaaggccctatacccgaatatgcagcgcggtgcgggaatgatgctaatgcccgtgcactgcgagtgtaaccacaagccccacagcgtgcccttcctgggccgccagctgtgtaagatgaccccgttcggcctgagcaacgccgaggacctggacaaggatcaaattagcgataagagcgtgctggccagcgtaaagtaccccagtctgatggtgttccagtgctgcaaccctgtgtaccgcaactcgcgcgcgcaaagcaccggtcccaactgcgattttaagatctccgccccggacatgctgggcgccctgcaaatgagccggcgcatgtggagcgagaccttccccgagattgctgttcctaaactggtgatccccgagtttaagtggcagcccaagtaccagtaccgcaacgtggcccttcccagcgcggcgcacaacgacgagcgcgagaacccctttgacttttaa

SEQ ID NO: 878 - DNA, 624 bp, Adenovirus D8
  MISC_FEATURE (1)..(624): D8.orf00020 L3 protease
atgagcggctccagcgaacaagagcttgcggccatcgtgcgcgacctgggctgcgggccctactttttgggcacccacgacaagcgcttcccgggcttccttgccggcaacaagctggcatgcgccatcgtcaacacggccggccgcgaaaccgggggcgtgcactggcttgcctttggctggaacccgcgctcgcgcacctgctacatgtttgacccctttgggttctcggaccgccggcttaagcagatttacagcttcgagtacgaggccatgttgcgtcgcagtgccctggccttatcgcccgaccgctgtcttagcctcgagcagtccacccagaccgtgcaggggcccgactccgccgcctgcggactcttttgttgcatgttcttgcatgcctttgtgcactggcccgatcgacccatggacgggaaccccaccatgaacttgctgacgggggtgcccaatggcatgctacaatcgccacaggtactgcccaccctccggcgcaaccaggagaagctctaccgcttccttgcgcaccactccccctactttcgctcccaccgcgccgccatcgaacacgccaccgcttttgataaaatgaaacaactgcgtgtataa

SEQ ID NO: 879 - DNA, 2859 bp, Adenovirus D8; identical to SEQ ID NO: 206
  MISC_FEATURE (1)..(2859): D8.orf00022 L3 hexon

SEQ ID NO: 880 - DNA, 702 bp, Adenovirus D8
  MISC_FEATURE (1)..(702): D8.orf00023 L3 VI capsid protein
atggaagacatcaattttgcgtccctggctccgcggcacggcacgcggccgttcatgggcacctggaacgagatcggcaccagccagctgaacgggggcgccttcaattggagcagtgtctggagcgggcttaaaaatttcggctcaacgctccggacctatgggaacaaggcctggaatagtagcacagggcagatgttgagggaaaagcttgcagaccaaaacttccagcaaaaggtggtggacggcctggcctcgggcattaacggggtagtggacattgcaaaccaggccgtgcagcgcgagataaacagccgcctgaacccgcggccgcccacggtagtggagatggaagatgcaactcttccccccaggggcgagaagcggccgcggcctgacgcggaggagacaaccctgcaggtagacgagccgccctcgtacgaggaggccctcaaggccggcatgcccaccacacgcatcattgcgccaatggccacgggtgtcatgaaacccgccacccttgacctgccttcaccacccgtgcccgctccaccaaaggcagctccggttgagcaggcccccccggtggcaaccgccgtgcgccgcgttcccgcccgccgccaggcccagaactggcagagcacgctacacagtatcgtgggcctaggagtgaaaagtctgaagcgccgccgatgctattaa

SEQ ID NO: 881 - DNA, 984 bp, Adenovirus D8
  MISC_FEATURE (1)..(984): D8.orf00025 L2 V core protein
atgtcaaagcgcaaaatcaaggaggagatgctccaggtcgtcgccccggagatttacggaccaccccaggcggaccagaaaccccgcaaaatcaagcgggttaaaaaaaaggatgaggtggacaaggaggcagtagagtttgtgcgcgagtttgctccgcggcggcgcgtaaattggaaggggcgcagggtgcagcgcgtgttgcggcccggcacggcggtggtgttcacgcccggcgagcggtcctcggtcaggagcaagcgtagctatgacgaggtgtatggcgacgacgacatcctggaccaggcggcggagcgggcgggcgagttcgcctacgggaagcggtcgcgcgaagaggagctgatctcgctgccgctggacgagagcaaccccacgccgagcctgaagcccgtgaccctgcagcagatgctgccccaagcagtgctgctgccgagccgcggggttaagcgcgagggcgagaacatgtacccgaccatgcagatcatggtgcccaagcgtcggcgcgtggaggacgtgctggacaccgtgaaaatggatgtggagccccaggtcaaggtgcgccccatcaagcaggtggcgccgggcctgggcgtgcagaccgtggacattcaaatccccaccgacatggatgtcgacaaaaaaccctcgaccagcatcgaggtgcagaccgacccctggctcctagcctccaccgccgccacggccaccgagcctcccaggaggcgaagatggggccctgccaaccggttgatgcccaactacgtgttgcatccttccatcattccgacgccgggctaccgcggcacccggtattacgccagccgcaggcgccccgcaggcaagcgccgtcgccgcaccaccacccgccgccgtctggcccccgcccgcgtgcgccgcgtaactacgcgccggggccgctcgcttgttctgcccaccgtgcgctaccaccccagcatcctttaa

SEQ ID NO: 882 - DNA, 591 bp, Adenovirus D8
  MISC_FEATURE (1)..(591): D8.orf00027 L2 VII core protein
atgtccattcttatctcgcccagcaataacaccggctggggtcttactaggcccagcaccatgtacggaggagccaagaagcgctccgatcagcaccccgttcgcgtccgcggccactttcgcgctccctggggcgcttacaagcgcgggcggacctctgcccccgccgccgtgcgcaccaccgtcgacgatgtcattgactcggtagtcgctgacgcgcgcaactacacccccgccccctccaccgtggacgcggtcattgacagcgtggtggctgacgcgcgcgactatgccagacgcaagagccggcggcgacgcattgccaggcgccaccggagcacgcccgccatgcgcgccgcccgggctctgctgcgccgtgccagacgcactggccgccgggccatgttgcaagccgcgcgtcgcgccgccgccgcacccacccccacaggcaggactcgcagacgagcggccgttgccgccgccgcggccatctctagcatgaccagacccaggcgcggaaacgtgtactgggtgcgcgactccatcacgggcgtgcgcgtgcccgtgcgcacccgtcctcctcgtccctga

SEQ ID NO: 883 - DNA, 1470 bp, Adenovirus D8; identical to SEQ ID NO: 176
  MISC_FEATURE (1)..(1470): D8.orf00029 L2 penton

SEQ ID NO: 884 - DNA, 225 bp, Adenovirus D8
  MISC_FEATURE (1)..(225): D8.orf00030 L2 penton
atgctgtttctgccctccgtaggagccatataccgcggaggcacaaacggaacctccagggtcgcctgcgccatcacgctttcgtacgagggaggaggagaggacaccaccgcgcgcctcatttctaacaaggaagagaacgcacgctatggccttggtgagttttattttgcatttaaaacatccgtcgccccagtctgggctgcagatgcgcgaacgggttaa

SEQ ID NO: 885 - DNA, 1698 bp, Adenovirus D8
  MISC_FEATURE (1)..(1698): D8.orf00031 L1 IIIa capsid protein
atgtcccagcagcaagccccggaccccgccataagggcggcgctgcaaagccagccgtccggtctagcatcggacgactgggaggccgcgatgcaacgcatcatggccctgacgacccgcaaccccgagtcctttagacaacagccgcaggccaacagactgtcggccattttggaggcggtggtcccctctcggaccaaccccacgcacgagaaggtgctggcgatcgtgaacgcgctggcggagaacaaggccattcgtcccgacgaggccgggctggtgtacaacgccctgctggagcgcgtgggccgctacaacagcacaaacgtgcagtccaacctggaccggctggtgacggacgtgcgcgaggccgtggcgcagcgcgagcggttcaagaacgagggcctgggctcgctggtggcgctaaacgccttcctggcgacgcagccggcaaacgtgccgcgcgggcaggacgattacaccaattttatcagcgcactgcggctgatggtgaccgaggtgccccagagcgaggtgtaccagtcgggcccggactactttttccagactagcagacagggcctgcagacggtaaacctgagccaggctttcaagaacctgcgcgggctgtggggcgtgcaggcgcccgtgggcgaccggtcgacggtgagcagcttgctgacgcccaactcgcggctgctgctgctgctgatcgcacccttcaccgacagcggcagcgtaaaccgcaactcgtacctgggccacctgctgacgctgtaccgcgaggccataggccaggcgcaggtggacgagcaaaccttccaggagatcacgagcgtaagccgcgcactggggcagaacgacaccgacagtctaagggccacccttaacttcttgctgaccaatagacagcagaagatcccggcgcaatatgcgctgtcggccgaggaagaaaggattctgagatatgtgcagcagagcgtagggctgttcctgatgcaggagggggccacccccagcgccgcgctggacatgaccgcgcgcaacatggaacctagcatgtacgccgccaaccggccgtttattaataagctgatggactacctgcaccgcgcggcgtccatgaactcggactactttaccaatgccatcttgaacccgcattggctcccgccgccagggttctacacgggcgagtacgacatgcccgaccccaacgatgggtttttgtgggacgacgtggacagcgcggtgttctccccaattttgcaaaagcgccaggaggcggtgcgcacgcccgcgagcgagggcgcggtgggtcggagcccctttcctagcttgggcagcttgcatagcctgcctgactcagtaaacagcggcagggtgagtcggccgcatttgctgggcgaggacgagtacctgaacgactcgctgctgcggccgccgcgggccaagaacgccatggccaataacgggatagaaagtctggtggacaaactgaaccgctggaagacctacgctcaggaccatagggaacctgcgcccgcgccgcggcgacagcgccacgaccggcagcggggcctggtgtgggacgacgaggactcggccgacgatagcagcgtgttggacttgggcgggagcggtagggttaacccgttcgcgcatctgcagcccagactggggcgacggatgttttaa

SEQ ID NO: 886 - DNA, 1119 bp, Adenovirus D8
  MISC_FEATURE (1)..(1119): D8.orf00032 L1 52 kDa protein
atgcatcccgtcctgcgccaaatgcgtcccacccccccggcgaccaccgcaaccgcggccgtagcaggcgccggcgctgtacaacagcagacagagatggacttggaagagggcgaagggctggcgagactgggggcgccgtccccggagcaacacccccgcgtgcagctgcaaaaggacgtgcgcccggcgtacgtgcctgcgcagaacctgttcagggaccgcagtggggaggagcccgaggagatgcgcgactgccggtttcgggcgggcagggagctgcgcgagggcctggaccgccagcgcgtgctgcgcgacgatgattttgagccaaacgagcagacggggatcagccccgcgcgcgcgcacgtggcggcggccaacctggtgacggcctacgagcagacggtaaaacaggagcgcaacttccaaaagagttttaacaaccacgtgcgcaccctgatcgcgcgcgaggaggtggccctgggcctgatgcacctatgggacctggcggaggccatcgtacagaacccgaacagcaagcctctgacggcgcagctgttcctggtggtgcagcacagcagggacaacgaggcgtttagggaggcgctgctaaacattgccgagcccgagggtcgctggctgctggagctaattaacattttgcagagcatcgtagtgcaggagcgcagcctgagcctggccgagaaggtggcggcgatcaactactcggtgctgagcctgggcaagttttacgcgcgcaagatttacaagacgccgtacgtgcccatagacaaggaggtaaagatagacagcttttacatgcgcatggcgctcaaggtgctaacgctgagcgacgacctgggtgtgtaccgcaacgaccgcattcacaaggccgtgagcacaagccggcggcgcgagctaagcgaccgcgagctgatgatgagcctgcgccgggcgctggtagggggcgccgccagcggcgaagagtcctactttgacatgggggcggacctgcattggcagccgagccggcgcgccttggaggccgcctacggtccagaggacttggatgaggatgaggaagaggaggaggatgcacccgctgcggggtactga

SEQ ID NO: 887 - DNA, 1851 bp, Adenovirus D8
  MISC_FEATURE (1)..(1851): D8.orf00034 pTP DNA terminal protein
atggattatttcctaccgctgcgcaacatctggaaccgcgtccgcgagttcccgcgcgcctccaccaccgccgccggcatcacctggatgtcccgctacctctacggctaccaccgcctcatgctcgaggacctggccccgggcgcgccggccacccagcgctggccgctgtaccgccagccgccgccgcacttcctagtcggatatcagtaccttgtgcgcacctgcaacgactacgtctttgactcgcgcgccttctcgcggcttaggtactccgaggtcgtgcagcccggtttgcaaaccgttaactggtcgcttatggccaactgcacctacaccatcaacaccggggcctaccaccgctttgttgacatggacgacttccaagacaccctcacccgcgtgcaacaggccatcctcgccgagcgtgtcgtcgccgacctggcgctcgtgcagccgcttaggggcgtcggggtcacccgcatggaagactccgcctccgccgcaaatgatgacattgagaggctcatgcatgactactacaagaacctcagccggtgtcagggtcaggcctggggcatggccgagcggctccgcatacagcaagcgggacccaaggacctggtccttcttgccaccatccgccgcctgaaaaacgcctacttcaattacatcattagcaatcgcaattgtaacagtgtccacagggctgctacgtgtttaagcttaccttgtgactgcgattggctagacgctttccttcaaaaattttccgatccggtcgatcttgacgtgcttacgtcccctacaccgcaattaataagatgcattgttagcgccctttcgctacccaacggggacccgccctattaccgggagatgaccggcggcgtcttcacgctgcgtcctcgcgaacagggtcgcgccgtcactgaaaccatgcgtcgccgccgcggggagatgatcgagcgcttcgtcgaccgtctcccggtgcgtcgccgtcgtcgtcgggccccgccaccaccaccgcccccagaagaaatacaagaagaggtcgttatggaacaggaagaagaggaggcccccggggattttgagcgcgaggtgcgcgccaccatcgccgagctcatccggcttctggaagacgagcttacggtatcggcccgcaacgcccagtttttcaacttcgccgtggacttctacgaggctatggaaaggctggaggccattggcaacatcagcgaaatgcccctgcgccgctggattatgtacttttttgttaccgagcacattgccaccacccttaactacctttttcagcgcctgcgcaactacgccgtttttacgcggcacgtggagcttaaccttgcgcaggtggtcatgcgcgcgcgcgacgttgacggggacgtggtgtacagccgcgtctggaacgagagcggcctgggcgccttttcgcagcttatggaccgcatctcgaatgaccttgccgctaccgtcgagcgtgcgggtcgcggcgatctccaggaggaggagatcgagcagttcatgtccgagatcgcctaccaggacaactcgggcgacgtgcaagagatcctgcggcaggccgccgtcaatgacgccgagattgattctgttgaactgtctttcaggttcaaagtcacgggacccgtggtcttcacgcagaggcggcagatccaggatgtcaaccgccgcgtcgtcgcgcacgccagcgctctcagggcacagcaccgggacctgcccgagcgccacgccgacgtgcctctgccgcccctgcccatggggccggaaccgccgctgccgccgggagcgcgtccgcgacaccgcttttaa

SEQ ID NO: 888 - DNA, 3300 bp, Adenovirus D8
  MISC_FEATURE (1)..(3300): D8.orf00037 E2B DNA polymerase
gtggccccgcgcagctacgggctcatgcaatgcgtggacacggccaccaactcacccgtagaaatcaagtaccatttgcatctcaagcacgccctcacccgcctctacaaggtcaaccttagaaccctgcccccggacctggatctccgcgacaccatggacagctcccaactgcgcgcccttgtcttcgctctccgcccccgccgcgccgagatctggacctggctcccgcgcgggcttgtcagcctctccgtcctcgaggagccccagggtaagtcctacgcaggcgaacatgaaaaccaccagccagggccgccactcctgaagtttttccttaagggacgcgctgtgtatctcgtggataaggtacagcccgtgcagcgctgcgagtattgcggacgcttttacaagcatcagcacgagtgctcggttcgccggagggatttctactttcatcacatcaacagccactcgtccaactggtggcaggaaatccagttcttcccaatcggctctcatcctcgcacggagcggctctttgtcacctacgatgtagaaacctacacctggatggggtccttcggcaagcagctcgtccccttcatgctggtcataaaattctccggggaccccaagctggtcgcccttgctcgcgatcttgccgtgcgtttacgctgggatcgctgggagcgggacccccttaccttttactgcatcacccccgaaaagatggccgtgggccagcagttccgcctctttcgcgacgagcttcagacccttatggcccgcgagctctgggcttctttcatgcaagccaacccacatctccaggagtgggcactggagcagcacggcctgcaatgccctgaggaccttacctacgaggagcttaaaaagctgccgcacatcaaaggccgcccgcgatttatggaactatacatcgtcgggcacaacatcaacggctttgacgagattgtcctagccgcccaggttatcaacaaccgagcctgcgtcccgggccctttccgtatcacccgcaatttcatgccacgagcaggcaagattctcttcaatgacgtcactttcgctctgcctaaccccctctcaaagaagcgcacagattttgagctatgggaacacggcggctgcgacgactcggactttaagtaccagtttttgaaagtcatggtcagggacacctttgccctgacgcacacctcgctccgcaaggccgctcaagcttacgccctccccgtggagaagggctgctgtccctacaaggccgttaaccatttctacatgctgggctcttaccgtgcggacgatcaaggattcccgctccgggagtactggaaggatgacgaggagtacgcccttaaccgcgagctgtgggagaagaaaggacagacgggttatgacattatccgcgaaacgctggactactgcgccatggacgtccttgtcactgccgagctggttgccaagctgcaagactcctacgcgcactttatccgcgactcggtccgcctgccccacgcccactttaacatcttccaacggcccactatttcctccaactcgcatgccatctttcgccagatcgtctttcgcgccgagcagccccagcgtaccaatcttggccccgccttcttggcaccctcgcatgagttgtatgactacgtgcgcgccagcatccgcggggggcgctgttatcccacctacatcggcatcctctcggagcccatctatgtgtatgacatctgcggcatgtacgcctccgcgcttacgcatcccatgccctggggtccgcccctgaacccctgcgagcgagccctggccgcccgcaagtggcaaatggccttggatgatgcatccttaaaaattgattattttgacaaggaactctgtccgggcatcttcaccatcgatgcggacccccctgacgagcatttgcttgatgtgttaccacctttttgctcgcgcaagggcgggcgcctctgctggaccaacgaacccctgcgcggcgaggtggccaccagcgtggacctggtcaccctgcataaccgaggctggcgcgtcaggattgtgcccgacgagcgcaccactgtttttcccgaatggaagtgcgttgcgcgcgaatatgtccagctcaacattgcggccaaggagcgcgccgaccgtgacaaaaatcagaccatgagatccatcgccaagcttctctccaacgccctctatggctcctttgccaccaagcttgacaataaaaaaatagtcttttctgaccagatggatgaaagtctcctgaaaagcattgcgacagggcaggccaacatcaaatcctcctcgtttctagaaactgacaacctgagtgccgaggtcatgccagctctcgagaggcaatacctaccccaacagctgacgctcgtggacagcgacgcggaagagagtgaggacgagcacagacccgcccccttttatacccctccgtcgggaacccccggtcacgtggcctacacctacaagccaatcaccttcttggatgcggaggagggggacatgtgtctgcacacggtggaaacggtggaccccctggtggacaatgaccgctacccctcgcacgtggcctcctttgtcttggcgtggacgcgcgcctttgtctcagagtggtccgagtttctttacgaggaggaccgcgggacgcccctgcaggacaggccaatcaagtccgtctacggggacaccgacagcctgtttgtcaccgagcgcggacacagactcatggagacgcgaggtaagaagcgcatcaaaaagaacgggggaaaactggtttttgaccccaagcagcccgagctcacctggcttgttgagtgcgagaccgtctgcgtccactgcggagcggatgcctttgccccagagtccgtttttctcgcgcctaaactctacgccctgcaatccctcctctgtcccgcctgtgggcgctcttccaagggcaagctccgcgccaagggccatgccgccgagacccttaactaccagcttatggtcaactgctatcttgccgacgcgcagggcgaagaccgtgcccgtttcagcaccagcaggatgagtctcaagcgcacccttgcaagcgcccagcccggggcccaccccttcaccgtgacggagaccaccctcacgcggaccctgagaccctggaaggacatgacgctggttgcgctggacgcccatcgtcttgtgccctacagtcgcagtcgtcccaacccccgaaacgaggaagtctgctggatccagatgccgtag

SEQ ID NO: 889 - DNA, 1047 bp, Adenovirus D8
  MISC_FEATURE (1)..(1047): D8.orf00039 IVa2 maturation protein
atgcccatggccgacgggcttaagcccctaaaaaactttgcttccctgcaagaactgctctcgctgggcggggaccgcctccttagcgagcttgttcgggaaaacctccaagtcagagacatgcttaaccaggtagcccccctcctccgggacgacggcagctgcatctccttgaactaccacctgcaacccgtcatcggggtcatctacggcccaaccgggtgcggcaagtcccagctgttaagaaacctgctctcctcgcagctcatcacccccgccccggaaaccatttttttcatcgccccgcaggtggacatgatccccccctccgagatgaaagcctgggagatgcagatctgcgaggggaacttcgccccggggcccgagggaaccatcgtcccacaatctggcaccctccgccccaaattcattaaaatgtcttatgatgatctcacccaagagcataattacgatgtctctgaccccagaaacgtctttgccaaagccgcagcccacgggcccattgccatcatcatggatgagtgcatggaaaacctgggcgggcacaagggcgtctccaaattcttccacgctttcccttccaagttgcatgacaagttccccaagtgcacgggctacaccgtcctggtggtcctgcacaacatgaacccccggcgggatctgggcggtaacatcgccaaccttaagatccaggccaaactacacatcatctccccccgcatgcatccctcccagctcaaccgctttgccaacacctacaccaaggggctccccgtggccatcagtctcctccttaaggacatcatccagcaccacgcccagcgcccctgctatgactggatcatctacaacacaaccccagaacacgaggccatgcagtggtgctacctccacccccgggacgggcttatgcccatgtacctcaacatccaatcccacctctaccgggtcctggaaaaaatccaccgcactcttaatgatcgggagaggtggaccagggcctaccgcgcgcgaaaaaataaataa

SEQ ID NO: 890 - DNA, 408 bp, Adenovirus D8
  MISC_FEATURE (1)..(408): D8.orf00041 IX hexon associated protein
atgaacgggaccggcggggcctttgaaggggggctttttagcccttatttgacaacccgcctgccgggatgggccggagttcgtcagaatgtgatgggatcaacggtggacgggcgcccagtgcttccagcaaattcctctaccatgacctacgcgaccgtggggacgagctcgtcgcttgacagcaccgccgcagccgcggcagccgcagccgccatgacagcgacgagactggcctcgagctacatgcccagcagcggtagcagcccctccatccccagttccatcatcgccgaggagaaactgctggccctgctggctgagctggaagccctgagccgccagctgaccgccctgacccaggaggtgtccgagctccgcgaacagcagcagcagcaaaataaatga

SEQ ID NO: 891 - DNA, 1197 bp, Adenovirus D8
  MISC_FEATURE (1)..(1197): D8.orf00042 E1B large T antigen
atggccaggggagtgaagagggagaggagcgatgggggcaatactgggctgatgacccagctaactgccagcctgatgaatcgcaagcgcccagagcgtattacctggcacgagctacagcaggagtgcagggatgagataggcctgatgcaggataaatatggcctggagcaaataaaaacccattggttgaacccagacgaggattgggaggaggccattaagaaatatgccaagatagccctgcgcccagattgcaagtacagggtgactaagaccgtgaatattaaacatgcctgctacatctcggggaacggggcagaggtggacatcgatactctggacaagtcagccttcaggtgttgcatgatgggaatgagagcaggagtaatgaatatgaattccatgatctttataaacataaagttcaatggagagaagtttaatggggtactgtttatggccaacagccacatgaccctgcatggttgcagtttttttggctttaacaatatgtgtgcagaggtctggggtgctgctaagattaggggatgtaagttttacggctgctggatgggcgtggttggaagacccaagagcgagatgtctgtaaagcagtgtgtgtttgaaaaatgctacctgggagtctgtaccgagggcaatgctagagtaagacactgctcttccctagagacgggctgcttttgcctggtgaagggcacagcctcgattaagcataatgtggtaaagggctgcacggatgagcgcatgtacaacatgctgacctgcgactcgggggtctgccatatcctgaagaacatccatgtgacctcccaccccagaaaaaagtggccagtgtttgagaataacctgctgattaagtgccatatgcacctgggtgccagaaggggcaccttccagccgtaccagtgcaactttagccagaccaagctgctgttggagaacgatgccttctccagggtgaacctgaacggcatctttgacatggatgtctcggtgtacaagatcctgagatacgatgagaccaagtccagggtgcgcgcttgcgagtgcggtggcagacacaccaggatgcagccagtggccctggatgtgaccgaggagctgcgaccagaccacctggtgatggcctgtaccgggaccgagttcagctccagtggggaggacacagattag

SEQ ID NO: 892 - DNA, 432 bp, Adenovirus D8
  MISC_FEATURE (1)..(432): D8.orf00044 E1B small T antigen
gtgtacacagttaagaaggattatagcgaggaatttgaaaatctttttgccgactgctctggcctgctagattctttaaattttggccaccagtcccttttccaggaaagggtactccacagccttgatttttccagcccagggcgcactacagccggggttgcttttgtggtttttttggttgacaaatggagccaggacacccaactaagcaggggctacattctggactttgcagccatgcacctgtggagggcctggatgaggcagcggggacagagaatcttgaactactggcttctacagccagcagcttcgggtcttcttcatctacacagacaaacatccatgttggaggaagaaatgagggaggccatggacaagaacccgaggagcggcctggaccctccgtcggaagaggagctggattaa

SEQ ID NO: 893 - DNA, 207 bp, Adenovirus D8
  MISC_FEATURE (1)..(207): D8.orf00045 E1A 21 kDa protein
gtgtcagaggatgagtcatcacctttagaagaagaccacccgtctccccctgatcttacaaatgacacgcccctgcaagtgcgcagacccaccccggttagaccgagtggcgagaggcgagcggctgtttacaaaattgaggatttgttgcaggacgtgggtgggaatgaacctttgaacctgagcttgaaacgccccaggaactag

SEQ ID NO: 894 - DNA, 132 bp, Adenovirus D8
  MISC_FEATURE (1)..(132): D8.orf00046 E1A 28 kDa protein
atgcgtgtgtggttgtggaaaatcattttgtgttggacaatcctgaggtgccagggcaaggctgtaaatcctgtcaatatcaccgggaacagaccggagacccaaatgcttcctgcgctctgtgttacatga

SEQ ID NO: 895 - DNA, 120 bp, Artificial Sequence; identical to SEQ ID NO: 228
  D8.orf00048 hypothetical protein

SEQ ID NO: 896 - DNA, 378 bp, Adenovirus D9
  MISC_FEATURE (1)..(378): D9.orf00004 E4 14.0 K E4 ORF1 14.0 kDa protein
atggctgaatctctgtatgctttcatagatagtcctggagggatcgctcccgtccaggaagggactagcaatagatataccttcttttgccctgaatctttccacattcctccgcatggggtggtattgcttcacctaaaagtgagtgtgctggttcctactggatatcagggcagatttatggccttgaatgactaccatgccagggacatactaacccagtccgatgtgatttttgccggaagaagacaggaacttactgtgctgctttttaatcacacggaccgatttttgtatgtccgcaagggccacccagtgggtaccctgttgctggagagagtgatttttccttcagtaaaaatagccaccttagtttag

SEQ ID NO: 897 - DNA, 393 bp, Adenovirus D9
  MISC_FEATURE (1)..(393): D9.orf00005 E4 14.5 K E4 ORF2 14.5 kDa protein
atgcttcagcgacgcggtgtaagctaccacattgtggtccctggggtcctagtgacttatttagaggacttttctattacgcaaatgattaaagaaaaactaccacgctttatcactcacattttggaaggcatcaccggagacacaaagagagcttattccagcatgcagtttttgggtgctagctttggagcattaaagttttcccttacgcttgccagtcccacgcttagccctggctctgaattgtcagctgtagtggcccaggacttaagtgactttttgcagctgacattgaggcgcgagctcagggcggagggcagaaccttattgaatcttgttgttttgaacacgctgcaggtggtggagcagcaggatctgtttctattatga

SEQ ID NO: 898 - DNA, 336 bp, Adenovirus D9
  MISC_FEATURE (1)..(336): D9.orf00007 E4 13.6 K E4 ORF 3 13.6 kDa protein
atgaaagtggagggggcactgtgggagcttttccacatgtgcggagtggacttacaccaacaatttgtagagataattcaaggctggaaaaatgagaattacctggggatggtgcaggaatgtaacctgatgattgatgaaatcgatggagggccagcctttaatgtgattcttatgctggatgtacgcgtagagccactgctcgaagccacggtcgagcaccttgaaaatagagtgggttttgacctggctgtctgtttccaccagcacagcggaggggaacgctgtcacctgcgtgacttgcactttatcgtccttcgagaccgtttggaataa

SEQ ID NO: 899 - DNA, 879 bp, Adenovirus D9
  MISC_FEATURE (1)..(879): D9.orf00011 E4 34.1 K E4 ORF6 34.1 kDa protein
atgcaaaccgagattcaatccagctcgctccgccatcatccatatcgcagggcccgtttaccacgatctgatgaggaaaccagggcttcactgactgaacaacatcccctgttgcccgattgtgatcatgcagattatcataatgtaagttctgtccgtggattaccatgtgctgctggctttaccctgctccaagagtttccagtcccctgggatatgatcctgaccccagaggaaataaaaattttaaaaagatgtatgtcagtgtgcctgtgccctgctaccctggacttggtgagagctcagatggtgagcgggtacgagcgctggatcctgcattgccactgttcatccccgggctccctgcagtgtcgggcgggaggcaccctgctggccgtgtggttcaggagagtcatttacgggtgcatgttcaaccagcgcttcccctggtaccgtcagattgtgaacagaaacatgcccaaagagatcatgtatatgggcagtgtgtttatgaggggcaggcacctgatatactgccgcatctggtacgatggtcacgtgggttccatcatccccaacatgagctttggctggagcgccctgaattatgggctgctgaataacatggtgattatgtgctgcacttactgtgagaacatggcagagatcaggatgcggtgctgtgcccgacgcaccaggagactgatgctgaaggctgtggggattatagtcagagagacttgcgatcccgatccaatctgcagcagccgcaccgagccccggcggcagagactgctgagggcgctgatggagaggcacagacccatcctgttttccgagtatgaatctgtgcgttcttctcattccaccagactgtga

SEQ ID NO: 900 - DNA, 246 bp, Adenovirus D9
  MISC_FEATURE (1)..(246): D9.orf00012 E4 ORF6/7 protein
gtgaccttggactgtgaggctcgcttggatgacttttcagaggacggcttcatctcaatcaccgacccccgtttggctcgccaggaaactgtgtggattatagaccccaagtccagttcccgcactaatgagaacatttccctatttaaggccacccgtgctgagagaacagtgtacactgtgaaatgggctggtggtgggagactgactacccgtgctggtgtaaaaatcaataaagatacatga

SEQ ID NO: 901 - DNA, 1089 bp, Adenovirus D9; identical to SEQ ID NO: 147
  MISC_FEATURE (1)..(1089): D9.orf00016 L5 pIV 39.3 kDa fiber protein

SEQ ID NO: 902 - DNA, 150 bp, Adenovirus D9
  MISC_FEATURE (1)..(150): D9.orf00017 U protein
atgaaaattgtggaccaggaatttgacatccctttcaaggtgtggaggaagttcgccgcccgccggggactggaataccagagctgggaggagggtaacgaggtgctgctgaacaactacaccagagacatactttcagatttcaagtaa

SEQ ID NO: 903 - DNA, 393 bp, Adenovirus D9
  MISC_FEATURE (1)..(393): D9.orf00019 E3 14.8 K E3 14.8 kDa protein
atgactgaccaccacctggacctcgagatggacggccaggcctccgagcagcgcatcctgcaactgcgcgtccgtcagcagcaggagcgggccgccaaggagctcctcgatgccatcaacatccaccagtgcaagaagggcatcttctgccttgtcaaacaggcaaagatcacctacgagctcgtgtccggcggcaagcagcatcgcctcacctatgagctgccccagcagaagcagaagttcacctgcatggtgggcgtcaaccccatagtcatcacccagcagtcgggcgagaccaacggctgcatccactgctcctgcgaaagccccgagtgcatatactccctcctcaagaccctttgcggactccgcgacctcctccccatgaactga

SEQ ID NO: 904 - DNA, 390 bp, Adenovirus D9
  MISC_FEATURE (1)..(390): D9.orf00021 E3 14.5 K E3 14.5 kDa protein
atgcagactctgctcatgctgctatccctcctatcccctgccctcgccacttctgctgactctaaatgcaaattcgcggagatatggaatttcttagattgctatcaggagaaaattgatatgccctcctattacttggtgattgtgggaatagtcatggtctgctcctgcactttctttgccatcatgatctacccctgttttgatctcggctggaactctgttgaggcattcacatacacactagaaagcagttcactagcctccacgccaccgcccacaccgcctccccgcagaaatcagttcccactgattcagtacttagaagagccccctccccggcccccttccactgttagctactttcacataaccggcggcgatgactga

SEQ ID NO: 905 - DNA, 276 bp, Adenovirus D9
  MISC_FEATURE (1)..(276): D9.orf00022 E3 10.4 K E3 ORF 4 10.4 kDa protein
atgattcctaggttcttcctatttaacatcctcttttgtctcttcaacatctgtgctgccttcgcggccgtctcgcacgcctcgcccgactgtctagggcctttccccacctacctcctctttgccctgctcacctgcacctgcgtctgcagcattgtctgcgtggtcatcaccttcctgcagctcatcgactggtgctgcgcgcgctataattatctccaccacagtcccgaatacagggacgagaacgtagccagaatcttaaggctcatctga

SEQ ID NO: 906 - DNA, 789 bp, Adenovirus D9
  MISC_FEATURE (1)..(789): D9.orf00023 E3 33.1 K E3 ORF3 33.1 kDa protein
atgaaggctttcacagcttgcgttctgattagcatagtcacacttagttcagctgcaatgattaatgttaatgtcactagaggtggtaaaattacattgaatgggacttatccacaaactacatggacaagatatcataaagatggatggaaaaatatctgtgaatggaatgttactgcatataaatgcttcaataatggaagcattactattactgccactgccaacattacttctggcacatacaaagctgaaagctataaaaatgaaatcaaaaaactaacctataaaaacaacaaaaccacatttgaagattctggaaattatgaacatcaaaaattatctttttatatgttgacaataattgaactgcctacaactaaggctcccaccacaaccagtacaactattaagaccactactcacactacagtgcaaaatactactttattgattgggtttttactgagagagaatgaaagtactactgaacagacagaggctacctcaagtgccttcagcagcactgcaaatttaacttcgcttgcttggactaatgaaaccggagtatcattgatgcatggccagccttactcaggtttggatattcaaattacttttctggttgtctgtgggatctttattcttgtggttcttctgtactttgtctgctgcaaagccagagagaaatctaggaggcccatctacaggccagtgattggggaacctcagccactccaagtggatggaggcttaaggaatcttctcttctcttttacagtatggtga

SEQ ID NO: 907 - DNA, 1230 bp, Adenovirus D9
  MISC_FEATURE (1)..(1230): D9.orf00024 E3 45.8 K E3 45.8 kDa protein
atgaatactttgaccagtgtcgtgctgctctctcttcttgtagcttttagtcaggcaggaattattaacttaaatgtatcatggggaatgaatctaactttagtgggaccctcagacctgccagttacatggtatgatggaaagggaatgcagttttgtgatggaaatacaattaagaacccacaaatcaagcatagctgtaatcaacagaatctaactttacttaatgctgacaagtctcatgaaagaacttacctaggttacagacatgacagtaagggaaaagtagactataaggttacagtcataccacctcctccagccactcgcaagcctttgtcagagcctcattatgttactgtgactatgggcgataacataactttagtgggaccctcagacctgccagttacatggtatgatggagaaggaaataaattctgcgatggagaaaaagttgaacatgcagaatttaatcatacatgtaacatccagaacctgacactgctctttgtcaacttaacgcataatggagcatacattggttataacaaagacggttctgatagagaattatatgaggtgtcagtcaaaaccttgtttcagaacggggctggacaaagtaaggttgaacaaggtaataaagggaaacctaatactgctcaaagtggtggtaaaaaaaccaaaacagaacatagaaaccagagtccaaaaagaaaatcaacaaataaccttcagccaacacaattgtatgttaggccttttactaatgttagtttaactggacctccaaatggcaaggttacttggtatgatggcgaacttaatgatccatgtgaacaaaagtacaaactcagaactttttgcaatcagcaaaatctaactttaattaatgtaagcagcacttatgatggcatctattatggcactgatgaaaaagataaggcaaatcgttacagaataaaagtaaatactacaaatcacaaaactgttaaaattaagccacataccagagaacctcctgctgtacaagaaaaacagtttgaattacaagatgcagaaactgatgaaaacgaatcaaaaattccctcagctactgtggcaatcgtggtgggagtgattgcgggctttgtaactctgatcattgtcttcatatgctacatctgctgccgcaagcgtcccaggtcatacaatcatatggtagacccactactcagcttctcttactga

SEQ ID NO: 908 - DNA, 504 bp, Adenovirus D9
  MISC_FEATURE (1)..(504): D9.orf00026 E3 18.4 K E3 18.4 kDa protein
atgctgggtcagacattgtggggaggaactatgaaggggctcttgctgattatcctttccctggtggggggtgtgctgtcatgccacgaacagccacgatgtaacatcaccacaggcaatgagaggagtgtcatatgcacagtagtcatcaaatgcgagcatgaatgccctctcaacatcacattcaaaaaccgtaccatggggaatgcatgggtgggcgactgggaaccaggagatgagcagaactacacggtcactgtccatggtagcgatggaaatcacactttcggtttcaaattcatttttgaagtcatgtgtgatatcacactgcatgtggctagacttcatggcttgtggccccctaccaaggaaaacatggttgggttttctttggcttttgtgatcatggcctgctttatgtcaggtctgctggtaggagctctagtgtggttcctgaaacgcaagcccaggtatggaaatgaggagaaggaaaaattgctataa

SEQ ID NO: 909 - DNA, 564 bp, Adenovirus D9
  MISC_FEATURE (1)..(564): D9.orf00027 E3 21.8 K E3 21.8 kDa protein
gtgagtttaataaaagctaaactcttgcaatactctggaccttgtcgtcatcaactcaacgagaccgtctacctcaccaaccagactgaggtaaaactcacctgcagaccacacaagacctatatcatctggttcttcgagaacacctcatttgcagtctcaaacactcactgcaacgacggtgttgaacttccaaacaacctttccagtggactgagttacgatacacatagagctaagctcgtcctctacaatcctttcgtagagggaacctaccactgccagagcggaccttgcttccacagttttactttggtgaacgttaccggcagcagcacagccgctccagaacctaaccttccttctgatactatcaaacctcgtttcggaggtgagctaaggcttcccccttctgaggagggggttagcccatacgaagtggtcgggtatttgattttaggggtggtcctgggtgggtgcatagcggtgctagctcagctgccttgctgggtagaaatcaaaatctttatatgctgggtcagacattgtggggaggaactatga

SEQ ID NO: 910 - DNA, 321 bp, Adenovirus D9
  MISC_FEATURE (1)..(321): D9.orf00028 E3 12.2 K E3 12.2 kDa protein
atgtcccatggtgactctgctgagctcgctcggttgaggcatctggaccactgccgccgcctgcgctgcttcgcccgggagagctgcggactcatctactttgagtttcccgaggagcaccccaacggtcctgcacacggagtgcggatcaccgtagagggcaccaccgagtctcacctggtcaggttcttcacccagcaacccttcctggtcgagcgggaccggggcgccaccacctacaccgtctactgcatctgtccgaccccgaagttgcatgagaatttttgctgtactctttgtggtgagtttaataaaagctaa

SEQ ID NO: 911 - DNA, 684 bp, Adenovirus D9
  MISC_FEATURE (1)..(684): D9.orf00029 L4 pVIII L4 pVIII protein
atgagcaaggagattcccaccccttacatgtggagctatcagccccagatgggcctggccgcgggcgcctcccaagactactccacacgcatgaactggctcagtgccggcccctcgatgatatcacgggtcaacggggtccgcagtcatcgaaaccagatattgttggagcaggcggcggtcacctccacgcccagggcaaagctcaacccgcgtaattggccctccaccctggtgtatcaggaaatccccgggccgactaccgtactacttccgcgtgacgcactggccgaagtccgcatgactaactcaggtgtccagctggccggcggcgcttcccggtgcccgctccgcccacaatcgggtataaaaaccctggtgatccgaggcagaggcacacagctcaacgacgagttggtgagctcttcgatcggtctgcgaccggacggagtgttccaactagccggagccgggagatcgtccttcactcccaaccaggcctacctgaccttgcagagcagctcttcggagcctcgctcgggaggcatcggaaccctccagttcgtggaggagtttgtgccctcggtctacttcaaccccttctcgggatcgccaggcctctacccggacgagttcataccgaacttcgacgcagtgagagaagcggtggacggctacgactga

SEQ ID NO: 912 - DNA, 219 bp, Adenovirus D9
  MISC_FEATURE (1)..(219): D9.orf00030 L4 20 kDa protein
ttgaccaccagggagctgaggaaccggatcttccccactctttatgccatttttcagcagagtcgaggtcagcagcaagagctcaaagtaaaaaaccggtctctgcgctcgctcacccgcagttgcttgtaccacaaaaacgaagatcagctgcagcgcactctcgaagacgccgaggctctgttccacaagtactgcgcgctcactcttaaagactaa

SEQ ID NO: 913 - DNA, 186 bp, Adenovirus D9
  MISC_FEATURE (1)..(186): D9.orf00032 L4 22 kDa protein
gtgaagggcgacggtaagcacgagcggcagggctaccgatcatggagggcccacaaagccgcgatcatcgcctgcttgcaagactgcggggggaacatcgctttcgcccgccgctacctgctcttccaccgcggggtgaacatcccccgcaacgtgttgcattactaccgtcaccttcacagctaa

SEQ ID NO: 914 - DNA, 2199 bp, Adenovirus D9
  MISC_FEATURE (1)..(2199): D9.orf00034 L4 100k L4 100kDa protein
atggaggagcagccgcgtaagcaggagcaggaggaggacttaaccacccacgagcaacccaaaatcgagcaggacctgggcttcgaagagccggctcgtctagaacccccacaggatgaacaggagcacgagcaagacgcaggccaggaggagaccgacgctgggctcgagcatggctacctgggaggagaggaggatgtgctgctgaaacacttgcagcgccagtccctcatcctccgggacgccctggccgaccggagcgaaacccccctcagcgtcgaggagctgtgtcgggcctacgagctcaacctcttctcgccgcgcgtgccccccaaacgccagcccaacggcacctgcgagcccaacccgcgtctcaacttctatcccgttttcgcggtccccgaggcccttgccacctatcacatttttttcaagaaccaaaagatccccgtctcctgccgcgccaaccgcacccgcgccgacgcgctcctcgctctggggcccggcgcgcgcatacctgatatcgcttccctggaagaggtgcccaagatcttcgaagggctcggtcgggacgagacgcgcgcggcgaacgctctgaaagaaacagcagaggaagagggtcacactagcgccctggtagagttggaaggcgacaacgccaggctggccgtgctcaagcgcagcgtcgagctcacccactttgcctaccccgccgtcaacctcccgcccaaggtcatgcgtcacatcatggatcagctcatcatgccccacatcgaagccctcgatgaaagtcaggagcagcgccccgaggacgcccgacccgtggtcagcgacgagatgctcgcgcgctggctcgggacccgcgagccccaggctttggaacagcggcgcaagctcatgctggccgtggtcctggtcaccctcgagctcgaatgcatgcgccgcttcttcagcgaccccgagaccctgcgcaaagtcgaggagaccctgcactacactttcagacacggtttcgtcaggcaggcctgcaagatttccaacgtggagctgaccaacctggtctcctgcctggggatcctgcatgagaaccgcctgggacagaccgtactccactctaccctgaagggcgaggcgcggagggactatgtccgcgactgcgtctttctctttctctgccacacatggcaagcagccatgggcgtgtggcagcagtgtctcgaggacgagaacctgaaggagctggacaagcttcttgctagaaaccttaaaaagctttggacgggcttcgacgagcgcaccgtcgcctcggacctggccgagatcgtcttccccgagcgcctgaggcagacgctgaaaggcgggctgcccgacttcatgagccagagcatgttgcaaaactaccgcactttcattctcgagcgatcggggatgctgcccgccacctgcaacgctttcccctccgactttgtcccgctgagctaccgcgagtgtcccccgccgctgtggagccactgctacctcttgcagctggccaactacatcgcctaccactcggacgtgatcgaggacgtgagcggcgaggggctgctcgagtgccactgccgctgcaacctgtgctccccgcaccgctccctggtctgcaacccccagctccttagcgagacccaggtcatcggtaccttcgagctgcaaggtccgcaggagtccaccgctccgctgaaactcacgccggggttgtggacttccgcgtacctgcgcaaatttgtacccgaggactaccacgcccatgagataaagttcttcgaggaccaatcgcggccgcagcacgcggatctcacggcctgcgtcatcacccagggcgcgatcctcgcccaattgcacgccatccaaaaatcccgccaagagtttcttctgaaaaagggtagaggggtctacctggacccccagacgggcgaggtgctcaacacgggtctcccccagcatgccgaggaagaagcaggagccgctagtggaggagatggaagaagaatgggacagccaggcagaggaggacgaatgggaggaggagacagaggaggaagaattggaagaggtggaagaggagcaggcaacagagcagcccgtcgccgcaccatccgcgccggcagccccggcggtcacggatacaacctccgcagctccggccaagcctcctcgtag

SEQ ID NO: 915 - DNA, 1470 bp, Adenovirus D9
  MISC_FEATURE (1)..(1470): D9.orf00035 E2A DBP DNA binding protein
atggccggcggcagtcaggacgtgcgccggttcatggagcgagaggccactccgccccggggccacgggtcggcgcgctatccgccggagcaggagaggagcccctcgcctccacctcctctgcccaccaagcgccgaaagtatcagcgggtgggctccgggtcttccgaggaggacgtggtccccgtggacagccctccaaaaaagaagcaagccagaaagaccaagcatgtgaccaaggtagaccccgacgaagagatgccccaggaagatgccgtgatcgtgggagtgggattcagccagccgccggttctgttgaaggaaggcaaggacggaaaacgcatcgtcgagcccgcgacccccggtattctgaacgtgcgcaaccccctgagtctgcctctggtctcgtcctgggagaagggcatggataccatgaacgtgcttatggaacgctaccgcgtcgacagcggcctgcgcgatgcttacaagctcatgcccgagcagaccgagatcttccaaaagatgtgccagacctggatgaacgaggaggcccgcggtctgcaactgaccttcagcaccagtaaatcatttagcaccgtcatgggtcgcctgttgcaaggttacatcttcagccacagcgggatcgcacacaagaattgggagtgcaccggctgcgccctgtgggatcacggctgcaccgaggtggaaggccagctcaagtgtttgcacgggacggtgatgatccacaaggaccacgtggtggagatggatgtgaccagcgagaacggccagcgcgcgttgaaggagcagcctagcaaggccaaggtgacccagaaccgctggggacggagcgtggtgcaactgaccagccatgacgcgcgctgctgcgtgcatgatgccgggtgcgggaataaccagttcagcgggaagagctgcggcctgtttttcagcgagggggccaaggcccagcaagctttcaagcagatctcggcctttgtcaaggccctctacccgaatatgcagcgcggcgcggggatgatgctgatgcccgtgcactgcgagtgtaaccacaagcctcagagcgtgcccttcctgggccgccagctgtgcaagatgaccccgttcggcctgagcaacgccgaggacctggacaaggatcagatcagcgacaagagcgtgctggccagtgtgaagtaccccagtctgatggtgttccagtgctgcaaccccgtgtaccgcaactcgcgcgcgcagagcaccggccccaactgcgatttcaagatctccgccccggacatactgggcgccctgcagatgagccggcgcatgtggagcgagaccttccccgagaccccagtgcccaaactggtgatccccgagttcaagtggcagcccaagttccagtaccgcaacgtggccctccccagcgcggcgcacaacgacgagcgcgagaaccccttcgacttttaa

SEQ ID NO: 916 - DNA, 630 bp, Adenovirus D9
  MISC_FEATURE (1)..(630): D9.orf00037 L3 23.6 kDa protease
atgagcggctccagcgaacgagagctcgcggccatcgtgcgcgacctgggctgcgggccctactttttgggcacccacgacaagcgcttcccgggcttcctcgccggcgacaagctggcctgcgccattgtcaacacggccggccgcgagaccggaggcgtgcactggctcgccttcggctggaacccgcgctcgcgcacctgctacatgttcgacccatttgggttctcggaccgccggctcaagcagatttacagcttcgagtacgaggctatgttgcgccgaagcgccctggcttcctcgcccgaccgctgtctcagcctcgagcagtccacccagaccgtgcaggggcccgactccgccgcctgcggacttttctgttgcatgttcttgcatgccttcgtgcactggcccgaccgacccatggacgggaaccccaccatgaacttgctgacgggggtgcccaacggcatgctacaatcgccacaggtgctgcccaccctccggcgcaaccaggaggagctctaccgcttcctcgcgcgccactccccttactttcgctcccaccgcgccgccatcgaacacgccaccgcttttgacaaaatgaaacaactgcgtgtatctcaataa

SEQ ID NO: 917 - DNA, 2817 bp, Adenovirus D9; identical to SEQ ID NO: 207
  MISC_FEATURE (1)..(2817): D9.orf00042 L3 pII hexon protein

SEQ ID NO: 918 - DNA, 654 bp, Adenovirus D9
  MISC_FEATURE (1)..(654): D9.orf00043 L3 pVI L3 pVI protein
atgggcacctggaacgagatcggcaccagccagctgaacgggggcgccttcaattggagcagtgtctggagcgggcttaaaaatttcggctcgacgctccggacctatgggaacaaggcctggaatagtagcacggggcagttgctaagggaaaagctcaaagaccagaactttcagcagaaggtggtggacgggctggcctcgggcattaacggggtggtggacatcgcgaaccaggccgtgcagcgcgagataaacagccgcctggacccgcggccgcccacggtggtggagatggaagatgcaactcttccgccgcccaaaggcgagaagcggccgcggcccgacgcggaggagacgatcctgcaggtggacgagccgccctcgtacgaggaggccgtcaaggccggcatgcccaccacgcgcatcatcgcgccgctggccacgggtgtaatgaaacccgccacccttgacctgcctccaccacccgcgcccgctccaccgaaggcagctcccgcggtcgtgcaggcccccccggtggcgaccgccgtgcgccgcgtccccgcccgccgccaggcccagaactggcagagcacgttgcacagtatcgtaggcctgggagtgaaaagtctgaagcgccgccgatgctattga

SEQ ID NO: 919 - DNA, 117 bp, Adenovirus D9
  MISC_FEATURE (1)..(117): D9.orf00044 L2 pX core protein L2 pX
atgcgcaggcgcctgagtggcggctttctgcccgcgctcatccccataatcgccgcggccatcggcacgatcccgggcatagcttccgttgcgctgcaggcgtcgcagcgccgttga

SEQ ID NO: 920 - DNA, 1005 bp, Adenovirus D9
  MISC_FEATURE (1)..(1005): D9.orf00045 L2 pV minor core protein L2 pV
atgtcaaagcgcaaaatcaaggaggagatgctccaggtcgtcgccccggagatttacggaccaccccaggcggaccagaaaccccgcaaaatcaagcgggttaaaaaaaaggatgaggtggacgagggggcagtagagtttgtgcgcgagttcgctccgcggcggcgcgtaaattggaaggggcgcagggtgcagcgcgtgttgcggcccggcacggcggtggtgttcacgcccggcgagcggtcctcagtcaggagcaagcgtagctatgacgaggtgtacggcgacgacgacatcctggaccaggcggcggagcgggcgggcgagttcgcctacgggaagcggtcgcgcgaagaggagctgatctcgctgccgctggacgaaagcaaccccacgccgagcctgaagcccgtgaccctgcagcaggtgctgccccaggcggtgctgctgccgagccgcggggtcaagcgcgagggcgagagcatgtacccgaccatgcagatcatggtgcccaagcgccggcgcgtggaggacgtgctggacaccgtgaaaatggatgtggagcccgaggtcaaggtgcgccccatcaagcaggtggcgccgggcctgggcgtgcagaccgtggacattcagatccccaccgacatggatgtcgacaaaaaaccctcgaccagcatcgaggtgcagaccgacccctggctcccagcctccactgctaccgtctccacttctaccgccgccacggctaccgagcctcccaggaggcgaagatggggcgccgccagccggctgatgcccaactacgtggtgcatccttccatcatcccgacgccgggctaccgcggcacccggtactacgccagccgccggcgcccagccagcaaacgccgccgccgcaccgccacccgccgccgtctggcccccgcccgcgtgcgccgcgtgaccacgcgccggggccgctcgctcgttctgcccaccgtgcgctaccaccccagcatcctttaa

SEQ ID NO: 921 - DNA, 585 bp, Adenovirus D9
  MISC_FEATURE (1)..(585): D9.orf00046 L2 pVII major core protein L2 pVII
atgtctattctcatctcgcccagcaataacaccggctggggtcttactagacccagcaccatgtacggaggagccaagaagcgctcccagcagcaccccgtccgcgtccgcggccacttccgcgctccctggggcgcttacaagcgcgggcggacttccaccgccgtgcgcaccaccgtcgacgacgtcatcgactcggtggtcgccgacgcgcgcaactatacccccgccccctccaccgtggacgcggtcatcgacagcgtggtggccgacgcgcgcgactatgccagacgcaagagccggcggcgacggatcgccaggcgccaccggagcacgcccgccatgcgcgccgcccgggctctgctgcgccgcgccagacgcacgggccgccgggccatgatgcgagccgcgcgccgcgctgccactgcacccacccccgcaggcaggactcgcagacgagcggccgccgccgccgccgcggccatctctagcatgaccagacccaggcgcggaaacgtgtactgggtgcgcgactccgtcacgggcgtgcgcgtgcccgtgcgcacccgtcctcctcgtccctga

SEQ ID NO: 922 - DNA, 1560 bp, Adenovirus D9; identical to SEQ ID NO: 177
  MISC_FEATURE (1)..(1560): D9.orf00047 L2-pIII penton

SEQ ID NO: 923 - DNA, 1596 bp, Adenovirus D9
  MISC_FEATURE (1)..(1596): D9.orf00051 L1 pIIIa L1 pIIIa 62.1 kDa protein
atgcaacgcatcatggccctgacgacccgcaaccccgagtcctttagacaacagccgcaggccaacagactctcggccattctggaggcggtggtcccctctcggaccaaccccacgcacgagaaggtgctggcgatcgtgaacgcgctggcggagaacaaggccatccgtcccgacgaggccgggctggtgtacaacgccctgctggagcgcgtgggccgctacaacagcacgaacgtgcagtccaacctggaccggctggtgacggacgtgcgcgaggccgtggcgcagcgcgagcggttcaagaacgagggcctgggctcgctggtggcgctgaacgccttcctggcgacgcagccggcgaacgtgccgcgcgggcaggacgattacaccaactttatcagcgcgctgcggctgatggtgaccgaggttccccagagcgaggtgtaccagtcgggcccggactactttttccagacgagccggcagggcttgcagacggtgaacctgagccaggctttcaagaacctgcgagggctgtggggcgtgcaggcgcccgtgggcgaccggtcgacggtgagcagcttgctgacgcccaactcgcggctgctgctgctgctgatcgcgcccttcaccgacagcggcagcgtgaaccgcaactcgtacctgggccatctgctgacgctgtaccgcgaggccataggccaggcgcaggtggacgagcagaccttccaggagatcactagcgtgagccgcgcgctggggcagaacgacaccgacagtctgagggccaccctgaacttcttgctgaccaatagacagcagaagatcccggcgcaatatgcgctgtcggccgaggaggaaaggatcctgagatatgtgcagcagagcgtagggctgttcctgatgcaggagggggccacccccagcgccgcgctggacatgaccgcgcgcaacatggaacctagcatgtacgccgccaaccggccgttcatcaataagctgatggactacctgcaccgcgcggcggtcatgaacacggactactttacaaacgccatcctgaacccgcactggctcccgccgccggggttctacacgggcgagtacgacatgcccgaccccaacgacgggttcctgtgggacgacgtggacagcgtggtgttctcgccgacctttcaaaagcgccaggaggcgccgccgagcgagggcgcggtggggaggagcccctttcctagcttagggagtttgcatagcttgccgggctcggtgaacagcggcagggtgagccggccgcgcttgctgggcgaggacgagtacctgaacgactcgctgctgcagccgccgcgggccaagaacgccatggccaataacgggatagagagtctggtggacaaactgaaccgttggaagacctacgctcaggaccatagggatgcgcccgcgccgcggcgacagcgccacgaccggcagcggggcctggtgtgggacgacgaggactcggccgacgatagcagcgtgttggacttgggcgggagcggtggggtcaacccgttcgcgcatctgcagcccaaactggggcgacggatgttttga

SEQ ID NO: 924 - DNA, 1125 bp, Adenovirus D9
  MISC_FEATURE (1)..(1125): D9.orf00054 L1 52/55k L1 52/55k 42.2 kDa protein
atgcatcccgtcctgcgccaaatgcgtcccacccccccggcgaccaccgcgaccgcggccgtagcaggcgccggcgctagccagccacagccacagacagagatggacttggaagagggcgaagggctggcgagactgggggcgccgtccccggagcgacacccccgcgtgcagctgcagaaggacgtgcgcccggcgtacgtgcctgcgcagaacctgttcagggaccgcagcggggaggagcccgaggagatgcgcgactgccggtttcgggcgggcagggagctgcgcgagggcctggaccgccagcgcgtgctgcgcgacgaggatttcgagccgaacgagcagacggggatcagccccgcgcgcgctcacgtggcggcggccaacctggtgacggcctacgagcagacggtgaagcaggagcgcaacttccaaaagagtttcaacaaccacgtgcgcaccctgatcgcgcgcgaggaggtggccctgggcctgatgcacctgtgggacctggcggaggccatcgtgcagaacccggacagcaagcctctgacggcgcagctgttcctggtggtgcagcacagcagggacaacgaggcgttcagggaggcactgctgaacatcgccgagcccgagggtcgctggctgctggagctgatcaacatcttgcagagcatcgtagtgcaggagcgcagcctgagcttggccgagaaggtggcggcgatcaactactcggtgctgagcctgggcaagttttacgcgcgcaagatttacaagacgccgtacgtgcccatagacaaggaggtgaagatagacagcttttacatgcgcatggcgctcaaggtgctgacgctgagcgacgacctgggcgtgtaccgcaacgaccgcatccacaaggccgtgagcacgagccggcggcgcgagctaagcgaccgcgagctgatgctgagcctgcgccgggcgctggtagggggcgctgccggcggcgaggagtcctacttcgacatgggggcggacctgcattggcagccgagccggcgcgccttggaggccgcctacggtccagaggacttggatgaggaagaggaagaggaggaggatgcacccgctgcggggtactga

SEQ ID NO: 925 - DNA, 1854 bp, Adenovirus D9
  MISC_FEATURE (1)..(1854): D9.orf00057 pTP 71.1 kDa preterminal protein
atggactatttcctgccgctgcgcaacatctggaaccgcgtccgcgagttcccgcgcgcctccaccaccgccgccggcatcacctggatgtcccgctacctctacggctaccaccgcctcatgctcgaggacctggccccgggcgcgccggccacccagcgctggccgctctaccgccagccgccgccgcacttcctagtcggctaccagtacctcgtgcgcacctgcaatgactacgtcttcgactcgcgcgccttctcgcggctcaggtactccgaggtcgtgcaacccggcctgcagaccgtcaactggtcgctcatggccaactgcacctacaccatcaacaccggggcctaccaccgctttgtcgacatggacgacttccaggacaccctcacccgcgtgcaacaggccatcctcgccgagcgcgtcgtcgccgacctggcgctcgtgcagccgctcaggggcgtcggggtcacccgcatggaagactccgcctccgccagtgatgacatcgagaggctcatgcatgactactacaagaacctgagccggtgtcagggccaggcctggggcatggccgagcggctccgcatccagcaagcgggacccaaggacctggtcctcctcgccaccatccgccgcctcaaaaacgcctacttcaattacatcatcagcaaccgcaattctaacagcgtccacagggctgctacgtgtttgagcttaccttgcgactgcgattggctagacgctttcctcgaaagattctccgatccggtcgatctcgacgcgctcacgtcccctacaccgcaattgataagatgcatcgtcagcgccctatcgctgcccaacggggacccgccccattaccgggagatgaccggcggcgtcttcacgctgcgtcctcgcgaacggggtcgcgccgtcaccgaaaccatgcgtcgccgccgcggggagatgatcgagcgcttcgtcgaccgtctcccggtgcgtcgccgtcgtcgtcgggccccgccaccaccaccgcccccagaggaagaaatagaagaagaggtcgtcatggaagaagaggaagaagaggaggcccccggggatttcgagcgcgaggtgcgcgccaccatcgccgagctcatccggctcctggaagacgagctcacggtctcggcccgcaatgcccagtttttcaacttcgccgtggatttctacgaggccatggaaaggctggaggccatcggcgacatcagcgagatgcccctgcgccgctggatcatgtacttcttcgtcaccgagcacatcgccaccaccctcaactacctcttccagcgcctgcgcaactacgccgtcttcacgcggcacgtggagctcaacctcgcgcaggtggtcatgcgcgcacgcgacgccgacggggacgtggtctacagccgcgtctggaacgagagcggcctgggcgccttctcgcagctcatgggccgcatctccaatgacctcgccgccaccgtggagcgcgcgggccgcggcgatctccaggaggaggagatcgaacagttcatgaccgagatcgcctaccaggacaactcgggcgacgtgcaagagatcctgcgtcaggccgccgtcaatgacgcagagattgattctgttgaactgtctttcaggttcaaagtcacggggcccgtggtcttcacgcagaggcggcagatccaggatgtcaaccgccgcgtcgtcgcgcacgccagcgctctcagggcgcagcaccgggacctgcccgagcgccacgccgacgtgcctctgccgcccctgcccgcggggccagaaccgccgctgccgccgggagcacgcccgcgacaccgcttctaa

SEQ ID NO: 926 - DNA, 3276 bp, Adenovirus D9
  MISC_FEATURE (1)..(3276): D9.orf00060 E2B DNA polymerase
atgcaatgcgtggacacgaccaccaactcacccgtggagatcaagtaccatctgcatctcaagcacgccctcacccgcctctacgaggtcaacctcagaaccctgcccccggacctggatctccgcgacaccatggacagctcccaactgcgcgccctcgtcttcgctctccgcccccgccgcgccgagatctggacctggctcccgcgcgggctcgtcagcctctccgtcctcgaggagccccagggtgagtcccacgcaggcgaacatgaaagccaccagccagggccgccactcctgaagttcctcctcaagggacgcgctgtgtatctcgtggatgaggtacagcccgtgcagcgctgcgagtactgcggacgcttttacaagcatcagcacgagtgctcggttcgccggcgggatttctactttcatcacatcaacagccactcgtccaactggtggcaggaaatccagttcttcccaatcggctctcatcctcgcacggagcggctctttgtcacctacgatgtagaaacctacacctggatggggtccttcggcaagcagctcgtccccttcatgctggtcatgaaattctcgggggaacccgagctggtcgccctcgctcgcgatctcgccgtgcgcttacgctgggatcgctgggagcgggaccccctcaccttctactgcgtcaccccagaaaagatggccgtgggccagcagttccgcctctttcgcgacgagctccagaccctcatggcccgcgagctctgggcttccttcatgcaagccaacccacatctccaggagtgggcgctagagcagcacggcctgcaatgccccgaggacctcacctacgaggagctcaaaaagctgccgcacatcaaaggccgcccgcgattcatggaactctacatcgtcgggcacaacatcaacggcttcgacgagatcgtccttgccgcccaggtgatcaacaaccgagcctccgtcccgggccctttccgcatcacccgcaatttcatgccgcgagcaggcaagattctcttcaatgacgtcactttcgctctgcctaaccccctctcgaagaagcgcaccgatttcgagctctgggagcacggcggctgcgacgactcggatttcaagtaccagttcttgaaagtcatggtcagggacaccttcgccctgacgcacacctcgctccgcaaggccgctcaagcttacgccctccccgtggagaagggctgctgtccctacaaggccgtgaaccatttctacatgctgggctcttaccgtgcggacgatcgaggattcccgctccgggagtactggaaggatgacgaggagtacgccctcaaccgcgagctgtgggagaagaaaggagaggcgggttatgacatcatccgcgaaacgctggactactgcgccatggacgtcctcgtcaccgccgagctcgtcgccaagctgcaagactcctacgcgcacttcatccgcgactcggtccgcttgccccacgcccactttaacatcttccaacggcccaccatctcctccaactcgcacgccatctttcgccagatcgtcttccgcgccgagcagccccagcgcaccaatctcggccccgccttcttggccccctcgcacgagttgtatgactacgtgcgcgccagcatccgcggggggcgctgttatcccacctacatcggcatcctctcggagcccatctatgtctacgacatctgcggcatgtacgcctccgccctcactcatcccatgccctggggtccgcccctcaacccctacgagcgagcgctggccgcccgcgagtggcagatggccttggatgatgcatcctcaaaaatcgattattttgacaaggaactctgtccgggcatcttcaccatcgatgcggacccccctgacgagcatctgcttgatgtgctgcccccgttctgctcgcgcaagggcggcagactctgctggaccaacgagcccctgcgcggcgaggtggccaccagcgtggacctggtcaccctgcataaccgcggctggcgcgtcaggatcgtgcccgacgagcgcaccaccgtcttccccgaatggaagtgcgtcgcgcgcgagtatgtccagctaaacatcgcggccaaggagcgcgccgaccgtgacaaaaatcagaccatgagatccatcgccaagcttctatccaacgccctctatggctccttcgccaccaagcttgacaataaaaaaatagtcttttctgaccagatggatgaaagtctcctaaaaagcatcgcggcagggcaagccaacatcaaatcctcctcgtttctagaaactgacaacctgagtgccgaggtcatgcccgctctcgagagggaatacctaccccaacagctggcgctcgtggacagcgacgcggaagagagtgaggacgagcacagacccgcccccttttatacccccccgtcggggacccccggtcacgtggcctacacctacaagccaatcaccttcttggatgcggaggagggggacatgtgtctgcacacggtggaaaaggtggaccccctagtggacaacgaccgctacccctcgcacgtggcctcctttgtcttggcgtggacgcgcgcctttgtctcagagtggtccgagtttctctacgaggaggaccgcgggacgcccctgcaggacaggccaatcaagtccgtctacggggacaccgacagcctgtttgtcaccgagcgcggacacagactcatggagacgcgaggtaagaagcgcatcaaaaagaacgggggaaaactggtttttgaccccgagcagccagagctcacctggctcgtcgagtgcgagaccgtctgcgcccactgcggagcggacgctttcgctcccgagtccgtctttctcgcccccaagctctacgccctgcaatccctcctctgtcccgcctgcgggcgctcttccaagggcaagctccgcgccaagggccacgccgccgaggccctcaactacgagctcatggtcaactgctatctcgccgactcgcagggcgaagaccgtgcccgtttcagcaccagcaggatgagtctcaagcgcacccttgcaagcgcccagccaggggcccaccccttcaccgtgacggagaccaccctcactcggaccctgagaccctggaaggacatgacgctggccgcgctggacgcccatcgtctcgtgccctacagtcgcagtcgtcccaacccccgaaacgaggaagtctgctggatcgagatgccgtag

SEQ ID NO: 927 - DNA, 1047 bp, Adenovirus D9
  MISC_FEATURE (1)..(1047): D9.orf00061 pIVa2 protein
atgcccatggccgacggactcaagcccctgaaaaactttgcttccctgcaagagctcctctcgctgggcggggaccgcctcctcggcgagctcgttcgggaaaacctccaagtcagagacatgctcaacgaggtggcccccctcctccgggacgacggcagctgcatgtccttgaactaccacctgcaacccgtcatcggggtcatctacggcccgaccgggtgcggcaagtcccagctgttgagaaacctgctctcttcgcagctcatcaccccagccccggaaaccgtttttttcatcgccccgcaggtggacatgatccccccctccgagatgaaagcctgggagatgcagatctgtgaggggaacttcgccccggggcccgagggaaccatcgtcccccaatctggcaccctccgccccaaattcattaaaatgtcttatgatgatctcacccaggagcataattatgatgtatctgaccccagaaacgtctttgccaaagccgcagcccacgggcccatcgccatcatcatggatgaatgcatggaaaacctgggcgggcacaagggcgtctccaaattcttccacgcattcccttccaagttgcatgacaagttccccaagtgcacgggctacaccgtcctggtggtcctgcacaacatgaacccccggcgggatctgggtggcaacatcgccaacctcaagatccaggccaaactgcacatcatctccccccgcatgcatccctcccagctcaaccgcttcgccaatacctacaccaaggggctccccgtggccatcagtctccttctcaaagacatcatccagcaccacgcccagcgcccctgctatgactggatcatctacaacacgaccccagagcacgaggccatgcagtggtgctacctccacccccgggacgggctcatgcccatgtacctcaacatccaatcccacctctaccgggtcctggaaaaaatccaccgcactctcaatgatcgggagaggtggaccagggcctaccgcgcgcgaaaaaataaataa

SEQ ID NO: 928 - DNA, 405 bp, Adenovirus D9
  MISC_FEATURE (1)..(405): D9.orf00064 pIX protein
atgaacgggaccggcggggccttcgaaggggggctttttagcccttatttgacaacccgcctgccgggatgggccggagttcgtcagaatgtgatgggatcgacggtggatgggcgcccagtgcttccagcaaattcctcgaccatgacctacgcgaccgtggggagctcgtcgctcgacagcaccgccgcagccgcggcagccgcagctgccatgacagcgacgagactggcctcgagctacatgcccagcagcggcagcagcccctctgtgcccagttccatcatcgccgaggagaaactgctggccctgctggccgagctggaagccctgagccgccagctggccgccctgacccagcaggtgtccgagctccgcgagcagcaacagcagcaaaataaatga

SEQ ID NO: 929 - DNA, 1488 bp, Adenovirus D9
  MISC_FEATURE (1)..(1488): D9.orf00066 E1B 55k E1B 55k protein
atggagccaggacacccaactgagcaggggctacatcctggacttcgcagccatgcacctgtggagggcctggatcaggcagcggggacagagaatcttgaattactggcttctacagccagcagctccgggtcttcttcgtctacacagacaaacatccatgttggaggaagaaatgaggcaggccatggacgagaacccgaggagcggcctggaccctccgtcggaagaggagctggattgaatcaggtatccagcctgtacccagagcttagcaaggtgctgacatccatggccaggggagttaagagggagaggagcgatgggggtaataccgggatgatgaccgagctgacggccagcctgatgaatcggaagcgcccagagcgccttacctggtacgagctacagcaggagtgcagggatgagttgggcctgatgcaggataaatatggcctggagcagataaaaacccattggttgaacccagatgaggattgggaggaggctattaagaagtatgccaagatagccctgcgcccagattgcaagtacatagtgaccaagaccgtgaatatcagacatgcctgctacatctcggggaacggggcagaggtggtcatcgataccctggacaaggccgccttcaggtgttgcatgatgggaatgagagcaggagtgatgaatatgaattccatgatcttcatgaacatgaagttcaatggagagaagtttaatggggtgctgttcatggccaacagccacatgaccctgcatggctgcagtttcttcggcttcaacaatatgtgcgcagaggtctggggcgcttccaagatcaggggatgtaagttttatggctgctggatgggcgtggtcggaagacccaagagcgagatgtctgtgaagcagtgtgtgtttgagaaatgctacctgggagtctctaccgagggcaatgctagagtgagacactgctcttccctggagacgggctgcttctgcctggtgaagggcacagcctctctgaagcataatatggtgaagggctgcacggatgagcgcatgtacaacatgctgacctgcgattcgggggtctgccatatcctgaagaacatccatgtgacctcccaccccagaaagaagtggccagtgtttgagaataacctgctgatcaagtgccatatgcacctgggagccagaaggggcaccttccagccgtaccagtgcaactttagccagaccaagctgctgttggagaacgatgccttctccagggtgaacctgaacggcatctttgacatggatgtctcggtgtacaagatcctgagatacgatgagaccaagtccagggtgcgcgcttgcgagtgcgggggcagacacaccaggatgcagccagtggccctggatgtgaccgaggagctgagaccagaccacctggtgatggcctgtaccgggaccgagttcagctccagtggggaggacacagattag

SEQ ID NO: 930 - DNA, 207 bp, Adenovirus D9
  MISC_FEATURE (1)..(207): D9.orf00069 E1A 14.9 kDa protein
gtgtcagaggatgagttatcaccctcagaagaagaccacccgtctccccctgagctgtcaggcgaaacgcccctgcaagtgttcagacccaccccagtcagacccagtggcgagaggcgagcggctgttgacaaaattgaggacttgttgcaggacatgggtggggatgaacctttggacctgagcttgaaacgccccaggaactag

SEQ ID NO: 931 - DNA, 543 bp, Adenovirus D9
  MISC_FEATURE (1)..(543): D9.orf00070 E1A 28.2 kDa protein
gtgcccggtgagctggctgtgcttatgctggaggactttgtggatacagtattggaggacgaactgcatccaagtccgttcgagctgggacccacacttcaggatctctatgatctggaggtagatgcccatgatgacgaccctaacgaggaggctgtgaatttaatatttccagaatctatgattcttcaggctgacatagccaacgaatctactccacttcatacaccgactctgtcacccatacctgaattggaagaggaggacgaactagacctccggtgttatgaggaaggttttcctcccagcgattcagaggatgaacggggtgagcagaccatggctctgatctcagactatgcttgtgtgattgtggaggagcaagatgtgattgaaaaatctactgagccagtacaaggctgtaggaactgccagtaccaccgggataagtccggagatgtgaacgcctcctgcgctttgtgctatatgaaacagactttcagctttatttacagtaagtggagtgaatgtgagagaggctga

SEQ ID NO: 932 - DNA, 126 bp, Artificial Sequence
  D9.orf00071 hypothetical protein
gtgtttttttcgcgaatttccgcgtccgtgtcaaagtccggtgtttatgtcacagatcagctgatccgcagggtatttaaaccagtcgagtccgtcaagaggccactcttgagtgccagcgagtag

SEQ ID NO: 933 - DNA, 378 bp, Adenovirus D10
  MISC_FEATURE (1)..(378): D10.orf00002 E4 14.0 K E4 ORF1 14.0 kDa protein
atggctgaatctctgtatgctttcatagatagtcctggagggatcgctcccgtccaggaagggactagcaatagatataccttcttttgcccagaatctttccacattcctccgcatggggtggtattgcttcacctaaaagtgagtgtgctggttcctactggatatcagggcagatttatggccttgaatgactaccatgccagggacatactaacccagtccgatgtgatttttgccggaagaagacaggaacttactgtgctgctttttaatcacacggaccgatttttgtatgtccgcaagggccacccagtgggtaccctgttgctggagagagtgatttttccttcagtgaaaatagccaccttagtttag

SEQ ID NO: 934 - DNA, 393 bp, Adenovirus D10
  MISC_FEATURE (1)..(393): D10.orf00003 E4 14.5 K E4 ORF2 14.5 kDa protein
atgcttcagcgacgcggtgtaagctaccacattgtggtccctggggtcctagtaacttatttagaggacttttctattacgcaaatgattaaagaaaaactaccacgctttatcactcacattttggaaggcatcaccggagacacaaagagagcttattccagcatgcagtttttgggtgctagctttggagcattaaagttttcccttacgcttgccagtcccacgcttagccctggctctgaattgtcagctgtagtggcccaggacttaagtgactttttgcagctgacattgaggcgcgagctcagggcggagggcagaaccttattgaatcttgttgttttgaacacgctgcaggtggtggagcagcaggatctgtttctattatga

SEQ ID NO: 935 - DNA, 354 bp, Adenovirus D10
  MISC_FEATURE (1)..(354): D10.orf00005 E4 13.6 K E4 ORF 3 13.6 kDa protein
atgaaggtctgcctgattatgaaagtggagggggcactgtgggagcttttccacatgtgcggagtggacttacaccaacaatttgtagagataattcaaggctggaaaaatgagaattacctggggatggtgcaggaatgtaacctgatgattgatgaaatcgatggagggccagcctttaatgtgattcttatgctggatgtacgcgtagagccactgctcgaagccacggtcgagcaccttgaaaatagagtgggttttgacctggctgtctgtttccaccagcacagcggaggggaacgctgtcacctgcgtgacttgcactttatcgtccttcgagaccgtttggaataa

SEQ ID NO: 936 - DNA, 879 bp, Adenovirus D10
  MISC_FEATURE (1)..(879): D10.orf00011 E4 34.1 K E4 ORF6 34.1 kDa protein
atgcaaaccgagattcaatccagctcgctccgccatcatccatatcgcagggcccgtttaccacgatctgatgaggaaaccagggcttcactgactgaacaacatcccctgttgcccgattgtgatcatgcagattatcataatgtaagttctgtccgtggattaccatgtgctgctggctttaccctgctccaagagtttccagtcccctgggatatgatcctgaccccagaggaaataaaaattttaaaaagatgtatgtcagtgtgcctgtgccctgctaccctggacttggtgagagctcagatggtgagcgggtacgagcgctggatcctgcattgccactgttcatccccgggctccctgcagtgtcgggcgggaggcaccctgctggccgtgtggttcaggagagtcatttacgggtgcatgttcaaccagcgcttcccctggtaccgtcagattgtgaacagaaacatgcccaaagagatcatgtatatgggcagtgtgtttatgaggggcaggcacctgatatactgccgcatctggtacgatggtcacgtgggttccatcatccccaacatgagctttggctggagcgccctgaattatgggctgctgaataacatggtgattatgtgctgcacttactgtgagaacatggcagagatcaggatgcggtgctgtgcccgacgcaccaggagactgatgctgaaggctgtggggattatagtcagagagacttgcgatcccgatcccatctgcagcagccgcacagagccccgacggcagagactgctgagggcgctgatggagaggcacagacccatcctgttttccgagtatgaatctgtgcgttcttctcattccaccagactgtga

SEQ ID NO: 937 - DNA, 246 bp, Adenovirus D10
  MISC_FEATURE (1)..(246): D10.orf00013 E4 ORF6/7 protein
gtgaccttggactgtgaggctcgcttggatgacttttcagaggacggcttcatctcaatcaccgacccccgtttggctcgccaggaaactgtgtggattatagaccccaagtccagttcccgcactaatcagaatattgccctatttaaggccacccgtgctgagagaattgtttacactgtgaaatgggctggtggtgggagactgactacccgtgctggtgtaaaaatcaataaagatacatga

SEQ ID NO: 938 - DNA, 1104 bp, Adenovirus D10; identical to SEQ ID NO: 148
  MISC_FEATURE (1)..(1104): D10.orf00014 L5 fiber

SEQ ID NO: 939 - DNA, 150 bp, Adenovirus D10
  MISC_FEATURE (1)..(150): D10.orf00015 U protein
atgaaaattgtggaccaggaatttgacatccctttcaaggtgtggaggaagttcgccgcccgccggggactggagtaccaaagctgggaggagggtaccgaggtgctgctgaacaactacaccagagacatactttcagatttcaagtaa

SEQ ID NO: 940 - DNA, 390 bp, Adenovirus D10
  MISC_FEATURE (1)..(390): D10.orf00018 E3 14.6 kDa protein
atgactgaccacctggacctcgagatggacggccaggcctccgagcagcgcaccctgcaactgcgcgttcgtcagcagcaggagcgggccgccaaggagctcctcgatgccatcaacatccaccagtgcaagaagggtatcttctgcctggtcaaacaggcaaagatcacctacgagctcctgtccggcggcaagcagcatcgcctcgcctatgagctgcctcagcagaagcagaagttcacctgcatggtgggcatcaaccccatagtcatcacccagcagtcgggcgagaccagcggctgcatccactgctcctgtgaaagccccgagtgcatctactccctgctcaagaccctttgcggactccgcgacctcctgcccatgaactga

SEQ ID NO: 941 - DNA, 393 bp, Adenovirus D10
  MISC_FEATURE (1)..(393): D10.orf00020 E3 14.7kDa protein
atgcagactctgctcatgctgctatccctcctatcccctgccctagccacttctgctgattactctaagtgcaaattcgcagacatatggaatttcttagattgctatcaggaaaaaattgatatgccctcctattacttggtgattgtgggaatagtcatggtctgctcctgcactttctttgccatcatgatctacccctgttttgatctcggctggaactctgttgaagcattcacatacacactagaaagcagttcactagcctccacgccaccgcccacaccgcctcctcgcagaaatcagttcccactgatacagtacttagaagagccccctccccgacccccttccactgttagctactttcacataaccggcggcgatgactga

SEQ ID NO: 942 - DNA, 276 bp, Adenovirus D10
  MISC_FEATURE (1)..(276): D10.orf00021 E3 RID-alpha
atgattcctaggttcttcctatttaacatcctcttctgtctcttcaacatctgtgctgccttcgcggccgtctcgcacgcctcgcccgactgtctcgggcccttcccaacctacctcctctttgctctgctcacctgcacctgcgtctgcagcattgtctgcctggtcatcaccttcctgcagctcatcgactggtgctgcgcgcgctacaattatctccatcacagtcccgaatacagggacgagaacgtagccagaatcttaaggctcatctga

SEQ ID NO: 943 - DNA, 792 bp, Adenovirus D10
  MISC_FEATURE (1)..(792): D10.orf00023 E3 CR1-gamma
atgaaggctttcacagcttgcgttctgattagcctagtcacacttagttcagctgcaggatatactcaagttaatgttactagagatggtagtataaatcttaaaggaccatacactaataccacatggtccagatttcacttgaacgcatggcaatttatttgcacatggaatgtgacagcatatgtatgtcacaaaaatggaagcattaccatcacagctcaaaagaacataacttctggagtattgaaagccgatgggtttcatgtaaattcatatggatatgaaaatcaaaaactgattttatataatttaacaatcattgagcatccaaccactaaagcgccaactactactaggcccaccacaattaggtcaaccatggaaacaaccacgcagcctaccactactcatactacacagatagacacaacactacagaatactactttattaattggatttttactgagagagaatgaaagtactactgatcagacagaggctacctcaagtgccttcagcagcactgcaaatttaacttcgcttgcttggactaatgaaaccggagtatcattgatgaatcgtcagcctttctcaggtttggatattcaaattacttttctggttgtctgtgggatctttattcttgcggttcttctgtactttgtctgctgcaaagccagagagaaatctaggaggcccatctacaggccagtaatcggggagcctcagcccctccaagtggatggaggcttaagaaatcttctcttctcttttacagtatggtga

SEQ ID NO: 944 - DNA, 1272 bp, Adenovirus D10
  MISC_FEATURE (1)..(1272): D10.orf00024 E3 CR1-beta
atgaatacagtgttccgtatcgtgctgctctctcttcttgtagctttcggtcaggcaggaattcatattattaatgctacatggtgggataatataactttagtgggaccctcagatactccagttacctggtatgatggcaatggattgcaattttgtgacggaagtacagttaagaatccgcagataagacatacttgtaatgatcaaaacttaactctgattcatgttaacaaaacccatgaaagaacatacatgggttacagacatgacagtaagggaaaagtagactataaggttacagtcattccacctcctcctgctactgtaaagccacaaccagatccagaaaatgtctttgtttatatgggagataatgtaactttagttggacctccaggaattccagttagttggtattatcataatggcacacagttctgcgatggagataaaattattcatccagaattcaaccacacctgtgataaacaaaaccttacactgctgtttgtaaactttacacatgacggaggctatcttggattcaattacaaaggtactaaaagaactcagtatgaggttatagttttagatcgatttccaaattctggtcagatgaaaattgaagaacaaagtgaggaaacagaacagaaacatactgagcaaaataaggctggacaaaagcagggtatagatacaaatcaaaagaaatctaataacagacaaaagccatctcaaaggccatcaagaagacggccgacaaacactcctgagacaaaacaacttacagtgtctattgggtctaacttaactttagttggtccagatggaaaagtcacttggtatgatggtgatttaaaaagaccatgtgaagaacaaaactataggcttccacatcagtgtagtactcagaacttaactttaattaatgtaactaaatctcatgagggaacttactatggcactaatgacaaagacgaaagcaaaagatacagagtgaaagtgaacactacaaattctcaagctgtaaaaattaacccatataccagacctactactcctgatcagaaacacagatttgaattgcaaattgaaaataatgcaaatgatgaagaatcaaaaattccatctactactgtggcaatcgtggtgggagtgattgcgggcttcataactataatcattgtcattctgtgctacatctgctgccgcaagcgtcccagggcatacaatcatatggtagacccactactcagcttctcttactga

SEQ ID NO: 945 - DNA, 471 bp, Adenovirus D10
  MISC_FEATURE (1)..(471): D10.orf00028 E3 gp 17.6 kDa protein
atgaaggggctcttgctgattatcctttccctggtggggggtgtgctgtcatgccacgaacagccacgatgtaacatcaccacaggcaatgagaggaacgactgctctgtagttattaaatgcgagcaccattgtcctctcaacatcacattcaagaataagaccatgggaaatgtatgggtgggattctggcaaccaggagatgagcagaactacacggtcactgtccatggtagcgatggcaatcacactttcggtttcaaattcatttttgaagtcatgtgtgatatcacactacatgtggctagacttcatggcttgtggccccctaccaaggagaacatggtgggtttttctttggcttttgtgatcatggcctgcttgatgtcaggtctgctggtaggggctctagtgtggtttctgaagcgcaagcccaggtacggaaatgaggagaaggaaaaattgctataa

SEQ ID NO: 946 - DNA, 567 bp, Adenovirus D10
  MISC_FEATURE (1)..(567): D10.orf00029 E3 CR1-alpha
gtggtgagtttaataaaagctaaactcttgcaatactctggaccttgtcgtcatcaactcaacgagaccgtctacctcaccaaccagactgaggtaaaactcacctgcagaccacacaagacctatatcatctggttcttcgagaacacctcatttgcagtctcaaacactcactgcaacgacggtgttgaacttccaaacaacctttccagtggactgagttacgatacacatagagctaagctcgtcctctacaatcctttcgtagagggaacctaccactgccagagcggaccttgcttccacagttttactttggtgaacgttaccggcagcagcacagccgctccagaacctaaccttccttctgatactatcaaacctcgtttcggaggtgagctaaggcttcccccttctgaggagggggttagcccatacgaagtggtcgggtatttgattttaggggtggtcctgggtgggtgcatagcggtgctagctcagctgccttgctgggtggaaatcaaaatctttatatgctgggtcagacattgtgggaaggaactatga

SEQ ID NO: 947 - DNA, 321 bp, Adenovirus D10
  MISC_FEATURE (1)..(321): D10.orf00030 E3 12.2 K E3 12.2 kDa protein
atgtcccatggtgactcggctgagctcgctcggttgaggcatctggaccactgccgccgcctgcgctgcttcgcccgggagagctgcggactcatctactttgagtttcccgaggagcaccccaacggccctgcacacggagtgcggatcaccgtagagggcaccaccgagtctcacctggtcaggttcttcacccagcaacccttcctggtcgagcgggaccggggcgccaccacctacaccgtctactgcatctgtccgaccccgaagtcgcatgagaatttttgctgtactctttgtggtgagtttaataaaagctaa

SEQ ID NO: 948 - DNA, 684 bp, Adenovirus D10
  MISC_FEATURE (1)..(684): D10.orf00031 L4 pVIII
atgagcaaggagattcccaccccttacatgtggagctatcagccccagatgggcctggccgcgggcgcctcccaagactactccacccgcatgaactggctcagtgccggcccctcgatgatatcacgggtcaacggggtccgtaaccatcgaaaccagatattgttggagcaggcggcggtcacctccacgcccagggcaaagctcaacccgcgtaattggccctccaccctggtgtatcaggaaatccccgggccgactaccgtactacttccgcgtgacgcactggccgaagtccgcatgactaactcaggtgtccagctggccggcggcgcttcccggtgcccgctccgcccacaatcgggtataaaaaccctggtgatccgaggcagaggcacacagctcaacgacgagttggtgagctcttcgatcggtctgcgaccggacggagtgttccaactagccggagccgggagatcgtccttcactcccaaccaggcctacctgaccttgcagagcagctcttcggagcctcgctccggaggcatcggaaccctccagtttgtggaggagtttgtgccctcggtctacttcaaccccttctcgggatcgccaggcctctacccggacgagttcataccgaacttcgacgcagtgagagaagcggtggacggctacgactga

SEQ ID NO: 949 - DNA, 186 bp, Adenovirus D10
  MISC_FEATURE (1)..(186): D10.orf00033 L4 22 kDa protein
gtgaagggtgacggtaagcacgagcggcagggctaccgatcatggagggcccacaaagccgcgatcatcgcctgcttgcaagactgcggggggaacatcgctttcgcccgccgctacctgctcttccaccgcggggtgaacatcccccgcaacgtgttgcattactaccgtcaccttcacagctaa

SEQ ID NO: 950 - DNA, 2199 bp, Adenovirus D10
  MISC_FEATURE (1)..(2199): D10.orf00035 L4 100 kDa protein
atggaggagcagccgcgtaagcaggagcaggaggaggacttaaccacccacgagcaaccaaaaatcgagcaggacctgggcttcgaagagccggctcgtctagaacccccacaggatgaacaggagcacgagcaagacgcaggccaggaggagaccgacgctgggctcgagcatggctacctgggaggagaggaggatgtgctgctcaaacacctgcagcgccagtccctcatcctccgggacgccctggccgaccggagcgaaacccccctcagcgtcgaggagctgtgtcgggcctacgagctcaacctcttctcgccgcgcgtgccccccaaacgccagcccaacggcacatgcgagcccaacccgcgtctcaacttctatcccgtctttgcggtccccgaggccctcgccacctatcacatctttttcaagaaccaaaagatccccgtctcctgccgcgccaaccgcacccgcgccgacgcgctcctcgctctggggcccggcgcgcgcatacctgatatcgcttccctggaagaggtgcccaagatcttcgaagggctcggtcgggacgagacgcgcgcggcgaacgctctgaaagaaacagcagaggaagagggtcacactagcgccctggtagagttggaaggtgacaacgccaggctggccgtgctcaagcgcagcgtcgagctcacccactttgcctaccccgccgtcaacctcccgcccaaggtcatgcgtcgcatcatggatcagctcatcatgccccacatcgaggccctcgatgaaagtcaggagcagcgccccgaggacgcccggcccgtggtcagcgacgagatgctcgcgcgctggctcgggacccgcgagccccaggctttggaacagcggcgcaagctcatgctggccgtggtcctggtcaccctcgagctcgaatgcatgcgccgcttcttcagcgaccccgagaccctgcgcaaggtcgaggagaccctgcactacactttcagacacggtttcgtcaggcaggcctgcaagatttccaacgtggagctgaccaacctggtctcctgcctggggatcctgcatgagaaccgcctgggacagaccgtactccactctaccctcaagggcgaggcgcggagggactatgtccgcgactgcgtctttctctttctctgccacacatggcaagcagccatgggcgtgtggcagcagtgtctcgaggacgagaacctgaaggaactggacaagcttcttgctagaaaccttaaaaagctttggacgggcttcgacgagcgcaccgtcgcctcggacctggccgagatcgtcttccccgagcgcctgaggcagacgctgaaaggcgggctgcccgacttcatgagccagagcatgttgcaaaactaccgcactttcattctcgagcgatcggggatgctgcccgccacctgcaacgctttcccctccgactttgtcccgctgagctaccgcgagtgtcccccgccgctgtggagccactgctacctcttgcagctggccaactacatcgcctaccactcggacgtgatcgaggacgtgagcggcgaggggctgctcgagtgccactgccgctgcaacctgtgctccccgcaccgctccctggtctgcaacccccagctccttagcgagacccaggtcatcggtaccttcgagctgcaaggtccgcaggagtccaccgctccgctgaaactcacgccggggttgtggacttccgcgtacctgcgcaaatttgtacccgaggactaccacgcccatgagataaagttcttcgaggaccaatcgcgtccgcagcacgcggatctcacggcctgcgtcatcacccagggcgcgatcctcgcccaattgcacgccatccaaaaatcccgccaagagtttcttctgaaaaagggtagaggggtctacctggacccccagacgggcgaggtgctcaacccgggtctcccccagcatgccgaggaagaagcaggagccgctagtggaggagatggaagaagaatgggacagccaggcagaggaggacgaatgggaggaggagacagaggaggaagaattggaagaggtggaagaggagcaggcaacagagcagcccgtcgccgcaccatccgcgccggcagccccgccggtcacggatacaacctccgcagctccggccaagcctcctcgtag

SEQ ID NO: 951 - DNA, 1470 bp, Adenovirus D10
  MISC_FEATURE (1)..(1470): D10.orf00036 E2A DNA-binding protein
atggccggcggcagtcaggacgtgcgccggttcatggaccgagaggccactccgccccggggccacggttcagcgcgctatccgccggagcaggagaggagcccctcgccgccacctcctctgccaaccaagcgccgaaagtatcagcgggtgggatccgggtcttccgaggaggacgtggtccccgtggacagccctccaaaaaagaagcaagccagaaagaccaagcatgtgaccaaggtagacccagacgaagagatgccccaggaagaagccgtgatcgtgggagtgggattcagccagccgccggttctgttgaaggaaggcaaggacggaaaacgcatcgtcgagcccgcgacccccggtgtcctgaacgtgcgcaaccccctgagtctgcctctggtctcgtcctgggagaagggcatggataccatgaatgtgctgatggaacgctaccgcgtcgacagcggcctgcgcgatgcttacaagctcatgcccgagcagaccgagatcttccaaaagatgtgccagacctggatgaacgaggaggcccgcggtctgcaactgaccttcaccacccagaagagctttagcaccatcatgggtcgcctgttgcaaggttacatcttcagccacagcgggatcgcgcacaagaactgggagtgcaccggcagtgccctgtgggaccacggctgcaccgaggtggaaggccagctcaagtgtctgcatgggacggtgatgatccacaaggaccacgtggtggagatggatgtgaccagtgagaacgggcagcgtgcgctgaaggagcaacccagcaaggccaaggtgacccagaaccgctggggacggagcgtggtgcaactgaccagccatgacgcgcgctgctgcgtccatgatgccgggtgcgggaataatcagttcagcgggaagagctgcggcctgtttttcagcgagggggccaaggcccagcaagctttcaagcagatcgcggccttcgtcaaggccctctacccgaatatgcagcgcggcgcggggatgatgctgatgcccgtgcactgcgagtgtaaccacaagcctcagagcgtgcccttcctgggccgccagctgtgcaagatgaccccgttcggcctgagcaacgccgaggacctggacaaggatcagatcagcgacaagagcgtgctggctagtgtgaagtaccccagtctgatggtgttccagtgctgcaacccagtgtaccgcaactcgcgcgcgcagagcaccggccccaactgcgatttcaagatctccgcgcctgacatgctgggcgccctgcagatgagccggcgcatgtggagcgagaccttccccgagaccccagtgcccaaactggtgatccccgagttcaagtggcagcccaagtaccagttccgcaacgtggccctccccagcgcggcgcacaacgacgagcgcgagaaccccttcgacttttaa

SEQ ID NO: 952 - DNA, 630 bp, Adenovirus D10
  MISC_FEATURE (1)..(630): D10.orf00038 L3 23.6 kDa protease
atgagcggctccagcgaaagagagctcgcggccatcgtgcgcgacctgggctgcgggccctactttttgggtacccacgacaagcgcttcccgggcttccttgccggcgacaagctggcctgcgccatcgtcaacacggccggccgcgagaccgggggcgtgcactggctcgccttcggctggaacccgcgctcgcgcacctgctacatgttcgacccctttgggttctcggaccgccggctcaagcagatttacagcttcgagtacgaggccatgctgcgccgaagcgccctggcctcctcgcccgaccgctgtctcagcctcgagcagtccacccagaccgtgcaggggcccgactccgccgcctgcggacttttctgttgcatgttcttgcatgccttcgtgcactggcccgaccgacccatggacggaaaccccaccatgaacttgctgacgggggtgcccaacggcatgctacaatcgccacaggtgctgcccaccctccggcgcaaccaggaggagctctaccgcttcctcgcgcgccactccccttactttcgctcccaccgcgccgccatcgaacacgccaccgcttttgacaaaatgaaacaactgcgtgtatctcaataa

SEQ ID NO: 953 - DNA, 2880 bp, Adenovirus D10; identical to SEQ ID NO: 208
  MISC_FEATURE (1)..(2880): D10.orf00041 L3 hexon

SEQ ID NO: 954 - DNA, 705 bp, Adenovirus D10
  MISC_FEATURE (1)..(705): D10.orf00042 L3 pVI
atggaagacatcaattttgcgtccctggctccgcggcacggcacgcggccgttcatgggcacctggaacgagatcggcaccagccagctgaacgggggcgccttcaattggagcagtgtctggagcgggcttaaaaatttcggctcgacgctccggacctatgggaacaaggcctggaatagtagcacggggcagttgctaagggaaaagctcaaagaccagaactttcagcagaaggtggtggacgggctggcctcgggcattaacggggtggtggacatcgcgaaccaggccgtgcagcgcgagataaacagccgcctggacccgcggccgcccacggtggtggagatggaagatgcaactcttccgccgcccaaaggcgagaagcggccgcggcccgacgcggaggagacgatcctgcaggtggacgagccgccctcgtacgaggaggccgtcaaggccggcatgcccaccacgcgcatcatcgcgccgctggccacgggtgtaatgaaacccgccacccttgacctgcctccaccacccgcgcccgctccaccgaaggcaactccggttgtgcaggcccccccggtggcgaccgccgtgcgccgcgtccccgcccgccgccaggcccagaactggcagagcacgttgcacagtatcgtaggcctgggagtgaaaagtctgaagcgccgccgatgctattga

SEQ ID NO: 955 - DNA, 117 bp, Adenovirus D10; identical to SEQ ID NO: 919
  MISC_FEATURE (1)..(117): D10.orf00043 L2 pX core protein L2 pX

SEQ ID NO: 956 - DNA, 1005 bp, Adenovirus D10
  MISC_FEATURE (1)..(1005): D10.orf00045 L2 pV
atgtcaaagcgcaaaatcaaggaggagatgctccaggtcgtcgccccggagatttacggaccaccccaggcggaccagaaaccccgcaaaatcaagcgggttaaaaaaaaggatgaggtggacgagggggcagtagagtttgtgcgcgagttcgctccgcggcggcgcgtaaattggaaggggcgcagggtgcagcgcgtgttgcggcccggcacggcggtggtgttcacgcccggcgagcggtcctcggtcaggagcaagcgtagctatgacgaggtgtacggcgacgacgacatcctggaccaggcggcggagcgggcgggcgagttcgcctacgggaagcggtcgcgcgaagaggagctgatctcgctgccgctggacgaaagcaaccccacgccgagcctgaagcccgtgaccctgcagcaggtgctgccccaggcggtgctgctgccgagccgcggggtcaagcgcgagggcgagagcatgtacccgaccatgcagatcatggtgcccaagcgccggcgcgtggaggacgtgctggacaccgtgaaaatggatgtggagcccgaggtcaaggtgcgccccatcaagcaggtggcgccgggcctgggcgtgcaaaccgtggacattcagatccccaccgacatggatgtcgacaaaaaaccctcgaccagcatcgaggtgcaaaccgacccctggctcccagcctccaccgctaccgtctccacttctaccgccgccacggctaccgagcctcccaggaggcgaagatggggcgccgccagccggctgatgcccaactacgtgttgcatccttccatcatcccgacgccgggctaccgcggcacccggtactacgccagccgccggcgcccagccagcaaacgccgccgccgcaccgccacccgccgccgtctggcccccgcccgcgtgcgccgcgtgaccacgcgccggggccgctcgctcgttctgcccaccgtgcgctaccaccccagcatcctttaa

SEQ ID NO: 957 - DNA, 585 bp, Adenovirus D10
  MISC_FEATURE (1)..(585): D10.orf00046 L2 pVII major core protein L2 pVII
atgtctattctcatctcgcccagcaataacaccggctggggtcttactagacccagcaccatgtacggaggagccaagaagcgctcccagcagcaccccgtccgcgtccgcggccacttccgcgctccctggggcgcttacaagcgcgggcggacttccaccgccgtgcgcaccaccgtcgacgacgtcatcgactcggtggtcgccgacgcgcgcaactacactcccgccccctccaccgtggacgcggtcatcgacagcgtggtggccgacgcgcgcgactatgccagacgcaagagccggcggcgacggatcgccaggcgccaccggagcacgcccgccatgcgcgccgcccgggctctgctgcgccgcgccagacgcacgggccgccgggccatgatgcgagccgcgcgccgcgctgccactgcacccacccccgcaggcaggactcgcagacgagcggccgccgccgccgctgcggccatctctagcatgaccagacccaggcgcggaaacgtgtactgggtgcgcgactccgtcacgggcgtgcgcgtgcccgtgcgcacccgtcctcctcgtccctga

SEQ ID NO: 958 - DNA, 1560 bp, Adenovirus D10; identical to SEQ ID NO: 178
  MISC_FEATURE (1)..(1560): D10.orf00048 L2-pIII penton

SEQ ID NO: 959 - DNA, 1596 bp, Adenovirus D10
  MISC_FEATURE (1)..(1596): D10.orf00051 L1 pIIIa L1 pIIIa 62.1 kDa protein
atgcaacgcatcatggccctgacgacccgcaaccccgagtcctttagacaacagccgcaggccaacagactctcggccattctggaggcggtggtcccctctcggaccaaccccacgcacgagaaggtgctggcgatcgtgaacgcgctggcggagaacaaggccatccgtcccgacgaggccgggctggtgtacaacgccctgctggagcgcgtgggccgctacaacagcacgaacgtgcagtccaacctggaccggctggtgacggacgtgcgcgaggccgtggcgcagcgcgagcggttcaagaacgagggcctgggctcgctggtggcgctgaacgccttcctggcgacgcagccggcgaacgtgccgcgcgggcaggacgattacaccaactttatcagcgcgctgcggctgatggtgaccgaggttccccagagcgaggtgtaccagtctggcccggactactttttccagacgagccggcagggcttgcagacggtgaacctgagccaggctttcaagaacctgcgcgggctgtggggcgtgcaggcgcccgtgggcgaccggtcgacggtgagcagcttgctgacgcccaactcgcgtctgctgctgctgctgatcgcgcccttcaccgacagcggcagcgtgaaccgcaactcgtacctgggccatctgctgacgctgtaccgcgaggccataggccaggcgcaggtggacgagcagaccttccaggagatcactagcgtgagccgcgcgctggggcagaacgacaccgacagtctgagggccaccctgaacttcttgctgaccaatagacagcagaagatcccggcgcaatatgcgctgtcggccgaggaggaaaggatcctgagatatgtgcagcagagcgtagggctgttcctgatgcaggagggggccacccccagcgccgcgctggacatgaccgcgcgcaacatggaacctagcatgtacgccgccaaccggccgttcatcaataagctgatggactacctgcaccgcgcggcggtcatgaacacggactactttacaaacgccatcctgaacccgcactggctcccgccgccggggttctacacgggcgagtacgacatgcccgaccccaacgacgggttcctgtgggacgacgtggacagcgtggtgttctcgccgacctttcaaaagcgccaggaggcgccgccgagcgagggcgcggtggggaggagcccctttcctagcttagggagtttgcatagcttgccgggctcggtgaacagcggcagggtgagccggccgcgcttgctgggcgaggacgagtacctgaacgactcgctgctgcagccgccacgggccaagaacgccatggccaataacggtatagagagtctggtggacaaactgaaccgttggaagacctacgctcaggaccatagggatgcgcccgcgccgcggcgacagcgccacgaccggcagcggggcctggtgtgggacgacgaggactcggccgacgatagcagcgtgttggacttgggcgggagcggtggggtcaacccgttcgcgcatctgcagcccaaactggggcgacggatgttttga

SEQ ID NO: 960 - DNA, 1119 bp, Adenovirus D10
  MISC_FEATURE (1)..(1119): D10.orf00055 L1 52 kDa protein
atgcatcccgtcctgcgccaaatgcgtcccacccccccggcgaccaccgcgaccgcggccgtagcaggcgccggcgctagccagccacagacagagatggacttggaagagggcgaagggctggcaagactgggggcgccgtccccggagcgacacccccgcgtgcagctgcagaaggacgtgcgcccggcgtacgtgcctgcgcagaacctgttcagggaccgcagcggggaggagcccgaggagatgcgcgactgccggtttcgggcgggcagggagctgcgcgagggcctggaccgccagcgcgtgctgcgcgacgaggatttcgagccgaacgagcagacggggatcagccccgcgcgcgcgcacgtggcggcggccaacctggtgacggcctacgaacagacggtgaagcaggagcgcaacttccaaaagagtttcaacaaccacgtgcgcacgctgatcgcgcgcgaggaggtggccctgggcctgatgcacctgtgggacctggcggaggccatcgtgcagaacccggacagcaagcctctgacggcgcagctgttcctggtggtgcagcacagcagggacaacgaggcgttcagggaggcactgctgaacatcgccgagcccgagggtcgctggctgctggagctgatcaacatcttgcagagcatcgtagtgcaggagcgcagcctgagcctggccgagaaggtggcggcgatcaactactcggtgctgagcctgggcaagttttacgcgcgcaagatttacaagacgccgtacgtgcccatagacaaggaggtgaagatagacagcttttacatgcgcatggcgctcaaggtgctgacgctgagcgacgacctgggcgtgtaccgcaacgaccgcatccacaaggccgtgagcacgagccggcggcgcgagctaagcgaccgcgagctgatgctgagccttcgccgggcgctggtagggggcgctgccggcggcgaggagtcctacttcgacatgggggcggacctgcattggcagccgagccggcgcgccttggaggccgcctacggtccagaggacttggaagaggatgaggaagaggaggaggatgcacccgctgcggggtactga

SEQ ID NO: 961 - DNA, 1854 bp, Adenovirus D10
  MISC_FEATURE (1)..(1854): D10.orf00058 pTP
atggactatttcctgccgctgcgcaacatctggaaccgcgtccgcgagttcccgcgcgcctccaccaccgccgccggcatcacctggatgtcccgctacctctacggctaccaccgcctcatgctcgaggacctggccccgggcgcgccggccacccagcgctggccgctctaccgccagccgccaccgcacttcctagtcggctaccagtacctcgtgcgcacctgcaacgactacgtcttcgactcgcgcgccttctcgcggatcaggtactccgaggtcgtgcaacccggcctgcagaccgtcaactggtcgctcatggccaactgcacctacaccatcaacaccggggcctaccaccgcttcgtcgacatggatgacttccaggacaccctcacccgcgtgcaacaggccatcctcgccgagcgcgtcgtcgccgacctggcgctcgtgcagccgctcaggggcgtcggggtcacccgcatggaagactccgcctccgccagtgatgacattgagaggctcatgcatgactactacaagaacctgagccggtgtcagggccaggcctggggcatggccgagcggctccgcatccagcaagcgggacccaaggacctggtcctcctcgccaccatccgccgcctcaaaaacgcctacttcaattacatcatcagcaaccgcaattctaacagcgtccacagggctgctacgtgtttgagcttaccttgcgactgcgattggctagacgctttcctcgaaagattctccgatccggtcgatctcgacgcgctcacgtcccctacaccgcaattgataagatgcatcgtcagcgccctatcgctgcccaacggggacccgccccattaccgggagatgaccggcggcgtcttcacgctgcgtcctcgcgaacggggtcgcgccgtcaccgaaaccatgcgtcgccgccgcggggagatgatcgagcgcttcgtcgaccgtctcccggtgcgtcgccgtcgtcgtcgggccccgccaccaccaccgcccccagaggaagaaatagaagaagaggtcgtcatggaagaagaggaagaagaggaggcccccggggatttcgagcgcgaggtgcgcgccaccatcgccgagctcatcaggctcctggaagacgagctcacggtctcggcccgcaatgcccagtttttcaacttcgccgtggatttctacgaggccatggaaaggctggaggccatcggcgacatcagcgagatgcccctgcgccgctggatcatgtacttcttcgtcaccgagcacatcgccaccaccctcaactacctcttccagcgcctgcgcaactacgccgtcttcacgcggcacgtggagctcaacctcgcgcaggtggtcatgcgcgcacgcgacgccgacggggacgtggtctacagccgcgtctggaacgagagcggcctgggcgccttctcgcagctcatgggccgcatctccaatgacctcgccgccaccgtggagcgcgcgggccgcggcgatctccaggaggaggagatcgaacagttcatgtccgagatcgcctaccaggacaactcgggcgacgtgcaagagatcctgcgtcaggccgccgtcaatgacgcagagattgattctgttgaactgtctttcaggttcaaagtcacggggcccgtggtcttcacgcagaggcggcagatccaggatgtcaaccgccgcgtcgtcgcgcacgccagcgctctcagggcgcagcaccgggacctgcccgagcgccacgccgacgtgcctctgccgcccctgcccgcggggccggaaccgccgctgccgccgggagcgcgtccgcgacaccgcttctaa

SEQ ID NO: 962 - DNA, 3300 bp, Adenovirus D10
  MISC_FEATURE (1)..(3300): D10.orf00062 E2B DNA polymerase
gtggccccgcgcagctacgggctcatgcaatgcgtggacacgaccaccaactcacccgtggagatcaagtaccatctgcatctcaagcacgccctcacccgcctctacgaggtcaacctcagaaccctgcccccggacctggatctccgcgacaccatggacagctcccaactgcgcgccctcgtcttcgctctccgcccccgccgcgccgagatctggacctggctcccgcgcgggctcgtcagcctctccgtcctcgaggagccccagggtgagtcccacgcaggcgaacatgaaagccaccagccagggccgccactcctgaagttcctcctcaagggacgcgctgtgtatctcgtggatgaggtacagcccgtgcagcgctgcgagtactgcggacgcttttacaagcatcagcacgagtgctcggttcgccggcgggatttctactttcatcacatcaacagccactcgtccaactggtggcaggaaatccagttcttcccaatcggctctcatcctcgcacggagcggctctttgtcacctacgatgtagaaacctacacctggatggggtccttcggcaagcagctcgtccccttcatgctggtcatgaaattctcgggggaacccgagctggtcgccctcgctcgcgatctcgccgtgcgcttacgctgggatcgctgggagcgggaccccctcaccttctactgcgtcaccccagaaaagatggccgtgggccagcagttccgcctctttcgcgacgagctccagaccctcatggcccgcgagctctgggcttccttcatgcaagccaacccacatctccaggagtgggcgctcgagcagcacggcctgcaatgccccgaggacctcacctacgaggagctcaaaaagctgccgcacatcaaaggccgcccgcgattcatggaactctacatcgtcgggcacaacatcaacggcttcgacgagatcgtccttgccgcccaggtgatcaacaaccgagcctccgtcccgggccctttccgcatcacccgcaatttcatgccgcgagcaggcaagattctcttcaatgacgtcactttcgctctgcctaaccccctctcgaagaagcgcaccgatttcgagctctgggagcacggcggctgcgacgactcggatttcaagtaccagttcttgaaagtcatggtcagggacaccttcgccctgacgcacacctcgctccgcaaggccgcacaagcttacgccctccccgtggagaagggctgctgtccctacaaggccgtgaaccatttctacatgctgggctcttaccgtgcggacgatcgaggattcccgctccgggagtactggaaggatgacgaggagtacgccctcaaccgcgagctgtgggagaagaaaggagaagcgggttatgacatcatccgcgaaacgctggactactgcgccatggacgtcctcgtcaccgccgagctcgtcgccaagctgcaagactcctacgcgcacttcatccgcgactcggtccgcttgccccacgcccactttaacatcttccaacggcccaccatctcctccaactcgcatgccatctttcgccagatcgtcttccgcgccgagcagccccagcgcaccaatctcggccccgccttcttggccccctcgcatgagttgtatgactacgtgcgcgccagcatccgcggggggcgctgttatcccacctacatcggcatcctctcggagcccatctatgtctatgacatctgcggcatgtacgcctccgccctcacgcatcccatgccctggggtccgccccttaacccctacgagcgagcgctggccgcccgcgagtggcagatggccttggatgatgcatcctcaaaaatagattattttgacaaggaactctgtccgggcatcttcaccatcgatgcggacccccctgacgagcatctgcttgatgtgctgccaccgttctgctcgcgcaagggcggcagactctgctggaccaacgagcccctgcgcggcgaggtggccaccagcgtggacctggtcaccctgcataaccgcggctggcgcgtcaggatcgtgcccgacgagcgcaccaccgtcttcccggaatggaagtgcgtcgcgcgcgagtatgtccagctcaacatcgcggccaaggagcgcgccgaccgtgacaaaaatcagacaatgagatccatcgccaagcttctctccaacgccctctatggctccttcgccaccaagcttgacaataaaaaaattgtcttttctgaccagatggatgaaagtctcctaaaaagcatcgcggcagggcaggccaacatcaaatcctcctcgtttctagaaactgacaacctgagtgccgaggtcatgcccgctctcgagagggaatacctaccccaacagctggcgctcgtggacagcgacgcggaagagagtgaggacgagcacagacccgcccccttttatacccccccgtcggggacccccggtcacgtggcctacacctacaagccaatcaccttcttggatgcggaggagggggacatgtgtctgcacacggtggaaaaggtggaccccctggtggacaacgaccgctacccctcgcacgtggcctcctttgtcttggcgtggacgcgcgcctttgtctcagagtggtccgagtttctctacgaggaggaccgcgggacgcccctgcaggacaggccaatcaagtccgtctacggggacaccgacagcctgtttgtcaccgagcgcggacacagactcatggagacgcgaggtaagaagcgcatcaaaaagaacgggggaaaactggtttttgaccccgagcagccagagctcacctggctcgtcgagtgcgagaccgtctgcgcccactgcggagcggacgctttcgctcccgagtccgtctttctcgcccccaagctctacgccctgcaatccctcctctgtcccgcctgcgggcgctcttccaagggcaagctccgcgccaagggccacgccgccgaggccctcaactacgagctcatggtcaactgctatctcgccgactcgcagggcgaagaccgtgcccgtttcagcaccagcaggatgagtctcaagcgcacccttgcaagcgcccagccaggggcccaccccttcaccgtgacggagaccaccctcactcggaccctgagaccctggaaggacatgacgctggccgcgctggacgcccatcgtctcgtgccctacagtcgcagtcgtcccaacccccgaaacgaggaagtctgctggatcgagatgccgtag

SEQ ID NO: 963 - DNA, 1047 bp, Adenovirus D10; identical to SEQ ID NO: 927
  MISC_FEATURE (1)..(1047): D10.orf00063 pIVa2 protein

SEQ ID NO: 964 - DNA, 405 bp, Adenovirus D10; identical to SEQ ID NO: 928
  MISC_FEATURE (1)..(405): D10.orf00066 pIX protein

SEQ ID NO: 965 - DNA, 1488 bp, Adenovirus D10; identical to SEQ ID NO: 929
  MISC_FEATURE (1)..(1488): D10.orf00068 E1B 55k E1B 55k protein

SEQ ID NO: 966 - DNA, 207 bp, Adenovirus D10
  MISC_FEATURE (1)..(207): D10.orf00072 E1A 14.8 kDa protein
gtgtcagaggatgagtcatcaccctcagaagaagaccacccgtctccccctgatctcacagatgacacgcccctgcaagtgcacagacccaccccagtcagagccagtggcgagaggcgagcagctgttgaaaaaattgaggacttgttacatgacatgggtggggatgaacctttggacctgagcttgaaacgccccaggaactag

SEQ ID NO: 967 - DNA, 543 bp, Adenovirus D10
  MISC_FEATURE (1)..(543): D10.orf00074 E1A 28 kDa protein
gtgcccggtgagctggctgtgcttatgctggaggactttgtggatacagtattggaggacgaactgcatccaagtccgttcgagctgggacccacacttcaggatctctatgatctggaggtagatgcccatgatgacgaccctaacgaggaggctgtgaatttaatatttccagaatctatgattcttcaggctgacatagccaacgaatctactccacttcatacaccgactctgtcacccatacctgaattggaagaggaggacgaactagacctccggtgttatgaggaaggttttcctcccagcgattcagaggatgaacggggtgagcagaccatggctctgatctcagactatgcttgtgtgattgtggaggaacaagtagtgattgaaaattctaccgagccagtggagggctgtagaaaatgccagtaccaccgggataagtctggagacccgaacgcatcatgcgctttgtgctatatgaaacagactttcagctttatttacagtaagtggagtgaatgtgagagaggctga

SEQ ID NO: 968 - DNA, 126 bp, Artificial Sequence; identical to SEQ ID NO: 932
  D10.orf00075 hypothetical protein

SEQ ID NO: 969 - DNA, 378 bp, Adenovirus D13
  MISC_FEATURE (1)..(378): D13.orf00002 E4 ORF1 protein
atggctgaatctctgtatgctttcatagatagtcctggagggatcgctcccgtccaggaagggactagcaatagatataccttcttttgcccagaatctttccacattcctccgcatggggtggttttgcttcacctgagagtgagcgtgctgattcctaatggctaccaaggcagatttatggccttgaatgactaccataccagcggcatactaacccagtccgatgtgatttttgccgggagaagacaggagctagctgtgctgctctttaaccacacggaccgatttttgtatgtccgcgagggccacccagtgggcacactgttgcttcagagagtgatttttccttcagtgagactggccactctggtttag

SEQ ID NO: 970 - DNA, 393 bp, Adenovirus D13
  MISC_FEATURE (1)..(393): D13.orf00003 E4 ORF2 protein
atgcttgagcgccacggtgtcagctaccacattgtggtacctggtgttttagtcaactatttagaggacttttccattactgcaatgattagaaaagagctacctcgctttattactcacctattggaaggcatcaccggagacacaaagagagcttattccagcatgcagtttttgggggctaattatggagcactgaaatattccctcacgcttgccagtcccacgcttagcccaggctcagagttggcagctgtggtgtctgaggacttgagtgactttttacagctgacgctgaggcgcgagctgagggcagagggcagaacctcattaaatcttgctattttgaacacgctgcaggtggtggagcagcaggatctgtttctaatatga

SEQ ID NO: 971 - DNA, 354 bp, Adenovirus D13
  MISC_FEATURE (1)..(354): D13.orf00005 E4 ORF3 protein
atgaaggtctgcctgattatgaaagtggagggggcgctgtgggagcttttccacatgtgcggagtggacttacaccaacaatttgtagagataattcaaggctggaaaaatgagaattacctggggatggtgaacgagtgtaacctgatgattgatgaaatcgatggagggccggcctttaatgtgattcttatgctggatgtacgcgtagagccactgctcgaagccacggtcgagcaccttgaaaatagagtgggttttgatctggctgtctgtttccaccagcacagcggcggggaacgctgtcacctgcgtgatttgcactttatcgtccttcgagaccgcttggaataa

SEQ ID NO: 972 - DNA, 270 bp, Adenovirus D13
  MISC_FEATURE (1)..(270): D13.orf00007 E4 ORF4 protein
atgaggggaattcgcatggacgggttttttgtttcatcagatgcagaggaacttctccagaatcttcgagaatggatgtacttcagttggatgactgagcggcagcagcgaaaggacggccgcaggaggggtatctgctgttcaagggcccatttctgctggcagaagtacgacaaggtacgcaagagaatccactacaatgcaaaccgagattcaatccagctcgctgcgccatcatccatatcgcagggcccgtttaccacgatctga

SEQ ID NO: 973 - DNA, 663 bp, Adenovirus D13
  MISC_FEATURE (1)..(663): D13.orf00008 E4 34.1 kDa protein
atgatcctgaccccagaggaaataaaaattttaaaaagatgtatgtcagtgtgcctgtgccccgctaccctggacttggtgagagctcagatggtgagcgggtacgagcgctggatcctgcattgccactgttcatccccgggctccctgcagtgtcgggcgggaggcaccctgctggccgtgtggttcaggagagtcatttacgggtgcatgttcaaccagcgtttcccatggtaccgtcagattgtgaacagagacatgcccaaagagatcatgtatatgggcagtgtgtttatgaggggcaggcacctgatatactgccgcatctggtacgatggtcacgtgggttccatcatccccaacatgagctttggctggagcaccctgaattatgggctgctaaataacatggtgattatgtgctgcacttactgtgagaacatggcagagatcaggatgcggtgctgtgcccgacgcaccaggagactgatgctgaaggctgtggggatcatagtcagagagacttgtgatcccgatcccatctgcagcagtcgcaccgagccccggcggcaaagactgttgagggcgctgatggagaggcacagacccatcctgttttccgagtatgaatctgtgcgttcttctcgttccaccagactgtga

SEQ ID NO: 974 - DNA, 246 bp, Adenovirus D13
  MISC_FEATURE (1)..(246): D13.orf00009 E4 ORF6/7 protein
gtgaccttggactgtgaggcccgcttggatgacttctcagaggacggcttcatctcaatcaccgacccccgtttggctcgccaggaaactgtgtggattatagacactaaatctagttcccgttccaataataatattcccctatttaaggccacccgtgctgaaagaatcgtgtacactgtgaaatgggctggtggtgggagactgactacccgtgctggtgtaaaaatcaataaagattcataa

SEQ ID NO: 975 - DNA, 1146 bp, Adenovirus D13; identical to SEQ ID NO: 149
  MISC_FEATURE (1)..(1146): D13.orf00011 L5 fiber

SEQ ID NO: 976 - DNA, 150 bp, Adenovirus D13
  MISC_FEATURE (1)..(150): D13.orf00012 U protein
atgaaaattgtggaccaggaatttgacatccctttcaaggtgtggaggaagttcgccgcccgccggggactggagtatcagagctgggaggagggtaccgaggtgctgctgaacaactacaccagagacatactttcagatttcaagtaa

SEQ ID NO: 977 - DNA, 390 bp, Adenovirus D13
  MISC_FEATURE (1)..(390): D13.orf00014 E3 14.5 kDa protein
atgactgaccacctggacctcgagatggacggccaggcctccgagcagcgcatcctgcaactgcgcgtccgtcagcagcaggagcgggccgccaaggagctcctcgatgccatcaacatccaccagtgcaagaagggcatcttctgcctggtcaaacaggcaaagatcacctacgagctcgtgtccggcggcaagcagcatcgcctcgcctatgagctgccccagcagaagcagaagttcacctgcatggtgggcatcaaccccatagtcatcacccagcagtcgggcgaggccagcggctgcatccactgctcctgcgaaagccccgagtgcatctactccctactcaagaccctttgcggactccgcgaccttctccccatgaactga

SEQ ID NO: 978 - DNA, 393 bp, Adenovirus D13
  MISC_FEATURE (1)..(393): D13.orf00017 E3 RID-beta
atgcagactctgctcatactgctatccctgctcctatcccctgccctcgctgatgatgattactctaagtgcaaatttgtgaagctatggaatttcttagactgctatgatgctaaaatggatatgccatcctattacttggtgattgtggggatagtcatggtctgctcctgcactttctttgccatcatgatctacccctgttttgatctcggctggaactctgttgaggcattcacatacacactagaaagcagttcactagcctccacgccaccacccacacctcctccccgcagaaatcagtttcccctgattcagtacttagaagagccccctccccgacccccttccactgttagctactttcacataactggcggcgatgactga

SEQ ID NO: 979 - DNA, 276 bp, Adenovirus D13
  MISC_FEATURE (1)..(276): D13.orf00018 E3 RID-alpha
atgattcctaggttcttcctatttaacatcctcttctgtctcttcaacatctgcgctgcctttgcggccgtctcgcacgcctcgcccgactgtctcgggcccttccccacctacctcctctttgccctgctcacctgcacctgcgtctgcagcattgtctgtctggtcgtcaccttcctgcagctcatcgactggtgctgcgcgcgctacaattacctacaccacagtcccgaatacagggacgagaacgtagccagaatcttaaggctcatatga

SEQ ID NO: 980 - DNA, 870 bp, Adenovirus D13
  MISC_FEATURE (1)..(870): D13.orf00020 E3 CR1-gamma
atgaaggctttaacagcttttggtctgatcttaatcacactaagctacactgctgcagctgcttgctattataatcttaatgtaaccagaggagaaaatattacactctcaggagcaggaattaatactacatggacagcttatcataatagtggaaatggaggaaaacatggatggttgccaatctgcacatggggcgatgggcgctatctgtgcaatggcaacagcagtactatttctaatcttacatttgtagcaagcagaaattcttctgacagaaattttaaggcagagagttatactaataatgatgattatgaagttgtaaaatcatgttattataatgttaaaatcattgagcttccaaccactagagcacccaccacagttaggtcaactacacagtcctctactaaagagacaacacagcctaccactgtgcccactacacaaccaaccaccacagccagtacaactattgagaccactactcacactacacacctagacacaacagtacagaatagtactgtgttggttaggtttttgttgagggaggaaagtactactgaacagacagaggctacctcaagtgccttcagcagcactgcaaatttaacttcgcttgcttcaataaatgagaccctcgtgccgttgatgctggaacaagatctaagaggtttggatatgcaaattacttttctggttgtatgtgggatctttattcttgtggttcttctgtactttgtctgctgtaaagccagagagaaatctaggcggcccatctacaggccagtaatcggggaacctcagccgctgcaagtggaagggggtctaaggaatcttctcttctctttttcagtatggtga

SEQ ID NO: 981 - DNA, 1236 bp, Adenovirus D13
  MISC_FEATURE (1)..(1236): D13.orf00021 E3 CR1-beta
atgaatactttgaccagtgtcgtgctgctctctcttcttgtggtttttagtcagggacaaatagaacatgaaaaacagagtgttcagtggggaaagaacataacgcttgtgggtcctaacgataagcctgttgaatggcatgggcctagagatcagctttgtaagggaaaacaaatttttcacccagaattcaatcacacatgtaatgaacaaaacctcacactgctgtttgtgaacaacactttccagggaaaatattatggctttagaaatgatggtaaaggtatgaaacaaattgaactaacagtagtcccacctcctgcctcaacacgcaaacctttgtcaaagccaaaacaagtcaatgtccaatatggacataatgtaacattagaaggtcctccaggaatacctattgactggcttggaccaactaatcagctttgtaaaggaaaacaaattttacatccagaaataaaccacacctgcaatgttcaaaatctaacactgctatttgtaaactacactcatcgcggagcgtattttggctttaacaaagacggaactgataggcaacactatgaagttactattctagatggcttcagagatgcagggcagacaaaagatgagacagacagtcataaaacaaaaggaaaaacttcttcaaaacagaaaaaaacacaaaaaaataactctcatagaaatgatgatgttaaagagttagattttccaagtggatctaatcaaactttaattggtcctcctggttcaaaagttgattggtacacaacaaaaaatggtgactttacaaaattgtgcgatggattgaacggtccaaagaatctgtgtaattatcagaacttgacattgcgaaatgtaagcagacaggatgaaggaacttattttgggtctaatgaacagtcaaagcattacagagttactgtctatacaaaacctagaaatcaaactaaaagaattcagccatatactactaagggaactaccaaaggaactacaaaattaacctcaggtaatcacagctttgaattgcaactggcagatgatcaatctaatcaacaggatcaacaaattccatcaactaccgtggcaatcgtggtgggtgtgattgcgggcttcataactctgatcattgtcattctgtgctacatctgctgccgcaagcgtcccagggcttacaataatatggtagacccactactcagcttctcttactga

SEQ ID NO: 982 - DNA, 261 bp, Adenovirus D13
  MISC_FEATURE (1)..(261): D13.orf00023 E3 gp 17.7 kDa protein
atgcagtgtgatatcacacatgacttcaaaaatgaatttgaaaccgaaagtgtgttttccatcgctaccatggacagtgaccgtgtagttctgctcatctcctggttcccaatcacccacccatacatttcccatggtcttattcttgaatgtgatgttgagaggacattcatgctcgcatcttatgattactgtacatatcacactcctctcattgcctgtggtaatgttacatcgtggctgttcgtggcaggccagtaa

SEQ ID NO: 983 - DNA, 192 bp, Adenovirus D13
  MISC_FEATURE (1)..(192): D13.orf00024 E3 gp 17.6 kDa protein
atgtgtgatatcacactgcatgtggctagacttcatggcttgtggccccctaccaaggagaacatggttgggttttctttggcttttgtgatcatggcctgcttgatgtcaggtctgctggtaggggctctagtgtggttcctgaagcgcaagcccaggtacggaaatgaggagaaggaaaaattgctataa

SEQ ID NO: 984 - DNA, 594 bp, Adenovirus D13
  MISC_FEATURE (1)..(594): D13.orf00025 E3 CR1-alpha
atgagaatttttgctgtactctttgtggtgagtttaataaaagctaaactcttacaatactctggaccttgtcgtcgtcaactcaacgagaccgtctacctcaccaaccagactgaggtaaaactcaactgcagaccagggggcaaatatatcatctggctctttgagaacacttccttcgcagtctccaacacccactgcaacgacggtattgaaatacccaacaaccttaccagtggactaacttacaccaccagaaagactaagctagtactctacaatccttttgtagagggaacctaccactgcaagagcggatcttgctaccacactttcactttggtgaacgttaccggcagcagcacagccgctcctgaaacaactaacctttcttctgatactaacaaacctcgtgtcggaggtgagctttgggttccctctctaacagagggtgggagtcatattgaagtggtcgggtatttgattttaggggtggtcctgggtgggtgcatagcggtgctatatcaccttccttgctgggtcgaaatcagggtctttatctgctgggtcagacattgtggggaggaaccatga

SEQ ID NO: 985 - DNA, 321 bp, Adenovirus D13
  MISC_FEATURE (1)..(321): D13.orf00026 E3 12.2 kDa protein
atgtcctatggtgactcggctgagctcgctcggttgaggcatctggaccactgccgccgcctgcgctgcttcgcccgggagagctgcggcctcatctactttgagctgcccgaggagcaccccaacggccctgcacacggagtgcggatcaccgtagagggcaccaccgagtctcacctggtcaggttcttcagccagcaacccttcctggtcgagcgggaccggggcgccaccacctacaccgtctactgcatctgtcctaccccgaagttgcatgagaatttttgctgtactctttgtggtgagtttaataaaagctaa

SEQ ID NO: 986 - DNA, 684 bp, Adenovirus D13
  MISC_FEATURE (1)..(684): D13.orf00027 L4 pVIII
atgagcaaggagattcccacaccttacatgtggagctatcagccccagatgggcctggccgcgggcgcctcccaagactactccacccgcatgaactggctcagtgccgggccctcgatgatctcacgggtcaacggggtccgtaaccatcgaaaccagatattgttggagcaggcggcggtcacctccacgcccagggcaaagctcaacccgcgtaattggccctccaccctggtgtatcaggaaatccccgggccgactaccgtactacttccgcgtgacgcactggccgaagtccgcatgactaactcaggtgtccagctggccggcggcgcttcccggtgcccgctccgcccacaatcgggtataaaaaccctggtgatccgaggcagaggcacacagctcaacgacgagttggtgagctcttcgatcggtctgcgaccggacggagtgttccaaatagccggagccgggagatcctccttcactcccaaccaggcctacctgaccttgcagagcagctcttcggagcctcgctccggaggcatcggaaccctccagttcgtggaggagtttgtgccctcggtctacttcaaccccttctcgggctcgccaggcctctacccggacgagttcatcccgaacttcgacgcagtaagagaagcggtggacggctacgactga

SEQ ID NO: 987 - DNA, 186 bp, Adenovirus D13
  MISC_FEATURE (1)..(186): D13.orf00029 L4 22 kDa protein
gtgaagggtgacggtaagcacgagcggcagggctaccgatcatggagagcccacaaagccgcgatcatcgcctgcttgcaagactgcggggggaacatcgctttcgcccgccgctacctgctcttccaccgcggggtgaacatcccccgcaacgtgttgcattactaccgtcaccttcacagctaa

SEQ ID NO: 988 - DNA, 2193 bp, Adenovirus D13
  MISC_FEATURE (1)..(2193): D13.orf00031 L4 100 kDa protein
atggagccgcgtaagcaggagcaggaggaggacttaaccacccacgagcaacccaaaatcgagcaggacctgggcttggaagagccggctcgtctagaacccccacaggatgaacaggagcacgagcaagacgcaggccaggaggagaccgacgctgggctcgagcatggctacctgggaggaggagatgtgctgctgaaacacttgcagcgccagtccctcatcctccgggacgccctggccgaccggagcgaaacccccctcagcgtcgaggagctgtgtcgggcctacgagctcaacctcttctcgccgcgcgtgccccccaaacgccagcccaacggcacctgcgagcccaacccgcgtctcaacttctaccccgtcttcgcggtccccgaggccctcgtcacctatcacatctttttcaagaaccaaaagatccccgtctcctgccgcgccaaccgcacccgcgccgacgcgctcctcgctctggggcccggcgcgcgcatacctgatatcgcttccctggaagaggtgcccaagatcttcgaagggctcggtcgggacgagacgcgcgcggcgaacgctctgaaagaaacagcagaggaagagggtcacactagcgccctggtagagttggaaggcgacaatgccaggctggccgtgctcaagcgcagcgtcgagctcacccatttcgcctaccccgccgtcaacctcccgcccaaggtcatgcgtcgcatcatggatcagctcatcatgccccacatcgaggccctcgatgaaagtcaggagcagcgccccgaggacgcccaaccggtggtcagcgacgagcagctcgcgcgctggctcgggacccgcgacccccaggccctggagcagcggcgcaagctcatgctggccgtggtcctggtcaccctcgagctggaatgcatgcgccgcttctttagcgaccccgagaccctgcgcaaggtcgaggagaccctgcactacactttcagacacggtttcgtcaggcaggcctgcaagatctccaacgtggagctgaccaacctggtctcctgcctggggatcctgcacgagaaccgcctggggcagaccgtgctccactcgaccctgaagggcgaggcgcggagggactacgtccgcgactgcgtctttctctttctctgccacacctggcaagcggccatgggcgtgtggcagcagtgtctcgaggacgagaacctgaaggagctggacaagcttcttgctagaaacctcaaaaagctgtggacgggcttcgacgagcggaccaccgctgccgacctggccgagatcgttttccccgagcgcctgaggcagacgctgaaaggcggcctgcccgacttcatgagccagagcatgttgcaaaactaccgcactttcattctcgagcgatctgggatgctgcccgccacctgcaacgccttcccctccgactttgtcccgctgagctaccgcgagtgtcccccgccgctgtggagccactgctacctcttgcagctggccaactacatcgcctaccactcggacgtgatcgaggacgtgagcggcgaggggctgctcgagtgccactgccgctgcaacctgtgctccccgcaccgctccctggtctgcaacccccagctcctgagcgagacccaggtcatcggtaccttcgagctgcaaggtccgcaggagtccaccgctccgctgaaactcacgccggggttgtggacttccgcgtacctgcgcaaatttgtacccgaggactaccacgcccacgagataaagttcttcgaggaccaatcgcgcccgcagcacgcggatctcacggcctgcgtcatcacccagggcgcgatcctcgcccaattgcacgccatccaaaaatcccgccaagagtttcttctgaaaaagggtagaggggtctacctggacccccagacgggcgaggtgctcaacccgggtctcccccagcatgccgaggaagaagccgctagtggaggaggagatggaagaagaatgggacagccaggcagaggaggaagaatgggaggaggagagtacagaggaggaagaattggaagaggtggaagaggagcaggcaacagagcagcccgtcgccgcaccatccgcgccggcagccccggcggtcacggatacaacctccgcagcgcctccggtcaagcctcctcgtag

SEQ ID NO: 989 - DNA, 1479 bp, Adenovirus D13
  MISC_FEATURE (1)..(1479): D13.orf00033 E2A DNA-binding protein
atggccggcggcagtcaggacgtgcgccggttcatggaccgagaggccactccgccccggggccacgggtcggcgcgctatccgccggagcaggagaggagcccctcgccgccacctcctctgcccaccaagcgccgaaagtaccagcgggtgggctccgggtcttccgaggaggacgtggtccccgtagacagccctccaaaactgccaaagaagcaagccaggaagaccaaacatgtgaccaaggtagaccccgacgaagagatgccccaggaagaagatgccgtgatcgtgggagtgggattcagccagccgccggttctgttgaaggaaggcaaggacggaaaacgcatcgtggagcccgcgacccccggtgtcctgaacgtgcgcaaccccctgagtctgcctctggtctcgtcctgggagaagggcatggatgccatgaacgtgctgatggaacgctaccgcgtcgacagcggcctgcgcgatgctttcaagctcatgcccgagcagaccgagatcttccagaagatgtgccagacctggatgaacgaggaggcccgcgggctgcaactgaccttcaccacccagaagagctttagcaccgtcatgggccgcctgttgcaaggttacatcttcagccacagcgggatcgcgcacaagaactgggagtgcaccggcagcgccttgtgggaccacggctgcaccgaggtggaaggccagctcaaatgtctgcacgggacggtaatgatccacaaggaccacgtggtggaaatggatgtgaccagcgagaacggacagcgcgcgttgaaggaacagcccagcaaggccaaggtgacccagaaccgctgggggagaagcgtggttcaactgaccagccatgacgcgcgctgctgcgtgcaggatgccggatgtgggaataaccagttcagcgggaagagctgcggcctgttcttcagcgagggggccaaggcccagcaagctttcaagcagatcatggccttcgtcaaggccctctacccgaatatgcagcgcggtgcggggatgatgctgatgcccgtgcactgcgagtgtaaccacaagccccacagcgtgcccttcctgggccgccagctgtgcaagatgaccccgttcggcctgagcaacgccgaggacctggacaaggatcagatcagcgacaagagcgtgctggccagcgtgaagtaccccagtctgatggtgttccagtgctgcaaccccgtgtaccgcaactcgcgcgcgcagagtaccggccccaactgcgatttcaagatctcagccccggacatgctgggcgccctgcagatgagccggcgcatgtggagcgagaccttccccgagattcccgttcccaaactggtgatccccgagttcaagtggcagcccaagtaccagtaccgcaacgtagccctccccagcgcggcgcacaacgatgagcgcgagaaccccttcgacttttaa

SEQ ID NO: 990 - DNA, 624 bp, Adenovirus D13
  MISC_FEATURE (1)..(624): D13.orf00034 L3 protease
atgagcggctccagcgaacgagagctcgcggccatcgtgcgcgacctgggctgcgggccctactttttgggcacccacgacaagcgcttcccgggcttcctcgccggcgacaagctggcctgcgccatcgtcaacacggccggccgcgagacaggaggcgtgcactggctcgcctttggctggaacccgcgctcgcgcacctgctacatgttcgacccctttgggttctcggaccgccggctcaagcagatttacagcttcgagtacgaggccatgctgcgccgcagcgccctggcttcctcgcccgaccgctgtctcagcctcgagcagtccacccagaccgtgcaggggcccgactccgccgcctgcggacttttctgttgcatgttcttgcatgccttcgtgcactggcccgaccgacccatggacggaaaccccaccatgaacttgctgacgggggtgcccaacggcatgctacaatcgccacaggtgctgcccaccctcaggcgcaaccaggaggagctctaccgcttcctcgcgcgccactccccttactttcgatcccaccgcgccgccatcgaacacgccaccgcttttgacaaaatgaaacaactgcgtgtatga

SEQ ID NO: 991 - DNA, 2820 bp, Adenovirus D13; identical to SEQ ID NO: 209
  MISC_FEATURE (1)..(2820): D13.orf00038 L3 hexon

SEQ ID NO: 992 - DNA, 711 bp, Adenovirus D13
  MISC_FEATURE (1)..(711): D13.orf00039 L3 pVI
atggaagacatcaattttgcgtccctggctccgcggcacggcacgcggccgttcatgggcacctggaacgagatcggcaccagccagctgaacgggggcgccttcaattggagcagtgtctggagcgggcttaaaaatttcggctcgacgctccggacctatgggaacaaggcctggaatagtagcacggggcagttgttgagggaaaagctcaaagaccagaacttccagcagaaggtggtggacgggctggcctcgggcattaacggggtggtggacatcgcgaaccaggccgtgcagcgcgagataaacagccgtctggacccgcgcccgcccgccgccacggtggtggagatggaagatgcaactcttccgccgcccaagggcgagaagcggccgcggcccgacgcggaggagacgatcctgcaggtggacgagccgccctcgtacgaggaggccgtcaaggccggcatgcccaccacgcgcatcatcgcgccgctggccacgggtgtaatgaaacccgccacccttgacctgcctccaccacctacgcccgctccaccgaaagcagctccggttgtgcagccccctccggtggcgaccgccgtgcgccgcgtccccgcccgccgccaggcccagaactggcagagcacgctgcacagtatcgtgggcctgggagtgaaaagtctgaagcgccgccgatgctattga

SEQ ID NO: 993 - DNA, 225 bp, Adenovirus D13
  MISC_FEATURE (1)..(225): D13.orf00041 L2 pX core protein L2 pX
atggctctcacttgccgcctgcgcatccccgtcccgaattaccgaggaagatcccgccgcaggagaggcatgacaggcagcggcctgaaccgccgccggcggcgggccatgcgcaggcgcctgagtggcggctttctgcccgcgctcatccccataatcgccgcggccatcggcacgatcccgggcatagcttccgttgcgctgcaggcgtcgcagcgccgttga

SEQ ID NO: 994 - DNA, 1005 bp, Adenovirus D13
  MISC_FEATURE (1)..(1005): D13.orf00044 L2 pV
atgtcaaagcgcaaaatcaaggaggagatgctccaggtcgtcgccccggagatttacggaccaccccaggcggaccagaaaccccgcaaaatcaagcgggttaaaaaaaaggatgaggtggacgagggggcagtagagtttgtgcgcgagttcgctccgcggcggcgcgtaaattggaaggggcgcagggtgcagcgcgtgttgcggcccggcacggcggtggtgttcacgcccggcgagcggtcctcggtcaggagcaagcgtagctatgacgaggtgtacggcgacgacgacatcctggaccaggcggcggagcgggcgggcgagttcgcctacgggaagcggtcgcgcgaagaggagctgatctcgctgccgctggacgaaagcaaccccacgccgagcctgaagcccgtgaccctgcagcaggtgctgccccaggcggtgctgctgccgagccgcggggtcaagcgcgagggcgagagcatgtacccgaccatgcagatcatggtgcccaagcgccggcgcgtggaggaagtgctggacagcgtgaaaatggatgtggagcccgaggtcaaggtgcgccccatcaagcaggtggcgccgggcctgggcgtgcaaaccgtggacattcagatccccaccgacatggatgtcgacaaaaaaccctcgaccagcatcgaggtgcagaccgacccctggctcccagcttctaccgccaccgcctctacatctaccgccgccacggctaccgagcctcccaggaggcgaagatggggcgccgccagccggctgatgcccaactacgtgttgcatccttccatcatcccgacgccgggctaccgcggcacccggtactacgccagccgcaggcgcccagccagcaaacgccgccgccgcaccaccacccgccgccgtctggcccccgcccgcgtgcgccgcgtgaccacgcgccggggccgctcgctcgttctgcccaccgtgcgctaccaccccagcatcctttaa

SEQ ID NO: 995 - DNA, 588 bp, Adenovirus D13
  MISC_FEATURE (1)..(588): D13.orf00045 L2 pVII
atgtctattctcatctcgcccagcaataacaccggctggggtcttactaggcccagcaccatgtacggaggagccaagaagcgctcccagcagcaccccgtccgcgtccgcggccacttccgcgctccctggggcgcatacaagcgcgggcggacttccaccgccgccgtgcgcaccaccgtcgacgacgtcatcgactcggtggtcgccgacgcgcgcaactatacccccgccccctccaccgtggacgcggtcatcgacagcgtggtggccgacgcgcgcgactatgccagacgcaagagccggcggcgacggatcgccaggcgccaccggagtacgcccgccatgcgcgccgcccgggctctgctgcgccgcgccagacgcacgggccgccgggccatgatgcgagccgcgcgccgcgctgccgctgcacccacccccgcaggcaggactcgcagacgagcggccgccgccgccgccgcggccatctctagcatgaccagacccaggcgcggaaacgtgtactgggtgcgcgactccgtcacgggcgtgcgcgtgcccgtgcgcacccgtcctcctcgtccctga

SEQ ID NO: 996 - DNA, 1554 bp, Adenovirus D13; identical to SEQ ID NO: 179
  MISC_FEATURE (1)..(1554): D13.orf00046 L2 penton

SEQ ID NO: 997 - DNA, 147 bp, Adenovirus D13
  MISC_FEATURE (1)..(147): D13.orf00048 L1 pIIIa L1 pIIIa 62.1 kDa protein
gtgcgtggggttggtccgagaggggaccaccgcctccagaatggccgagagtctgttggcctgcggctgttgtctaaaggactcggggttgcgggtcgtcagggccatgatgcgttgcatcgcggcctcccagtcgtccgatgctag

SEQ ID NO: 998 - DNA, 1515 bp, Adenovirus D13
  MISC_FEATURE (1)..(1515): D13.orf00049 L1 pIIIa
gtggtcccctctcggaccaaccccacgcacgagaaggtgctggcgatcgtgaacgcgctggcggagaacaaggccatccgtcccgacgaggccgggctggtgtacaacgccctgctggagcgcgtgggccgctacaacagcacgaacgtgcagtccaacctggaccggctggtgacggacgtgcgcgaggccgtggcgcagcgcgagcggttcaagaacgagggcctgggctcgttggtggcgctgaacgccttcctggcgacgcagccggcgaacgtgccgcgcgggcaggacgattacaccaactttatcagcgcgctgcggctgatggtgaccgaggtgccccagagcgaggtgtaccagtcgggcccggactactttttccagacgagccggcagggcttgcagacggtgaacctgagccaggctttcaagaatctgcgcgggctgtggggcgtgcaggcgcccgtgggcgaccggtcgacggtgagcagcttgctgacgcccaactcgcggctgctgctgctgctgatcgcgcccttcaccgacagcggcagcgtgaaccgcaactcgtacctgggccacctgctgacgctgtatagggaggccataggccaggcgcaggtggacgagcagacattccaggagatcacgagcgtgagccgcgcgctggggcagaacgacaccgacagtctgagggccaccctgaacttcttgctgaccaatagacagcagaagatcccggcgcagtacgcactgtcggccgaggaggaaaggattctgagatatgtgcagcagagcgtagggctgttcctgatgcaggagggggccacccccagcgccgcgctggacatgaccgcgcgcaacatggaacctagcatgtacgccgccaaccggccgttcatcaataagctgatggactacctgcaccgcgcggcggccatgaacacggactactttaccaacgccatcctgaacccgcactggctcccgccgcctgggttctacacgggcgagtacgacatgcccgaccccaacgacgggttcctgtgggacgacgtggacagcgcggtgttctcgcccgcctttcaaaagcgtcaggaagcggtgcgcacgcctagcgagggcgcggtgggacggagcccctttcctagcttggggagtttgcatagcctgccgggctcggtgaacagcggcagggtgagccggccgcgcttgctgggcgaggacgagtacctgaacgactcgctgctgcagccgccgcgggtcaagaacgccatggccaataacgggatagagagtctggtggacaaactgaaccgctggaagacctacgctcaggaccatagggacgcgcccgcgccgcggcgacagcgccacgaccggcagcggggcctggtgtgggacgacgaggactcggccgacgatagcagcgtgttggacttgggcgggagcggtggtggggccaacccgttcgcgcatctgcagcccagactggggcggcggatgttttga

SEQ ID NO: 999 - DNA, 1125 bp, Adenovirus D13
  MISC_FEATURE (1)..(1125): D13.orf00051 L1 52 kDa protein
atgcatcccgtcctgcgccaaatgcgtcccacccccccggcgaccaccgcgaccgcggccgtagcaggcgccggcgctagccagccacagccacagacagaaatggacttggaagagggcgaagggctggcgagactgggggcgccgtccccggagcgacacccccgcgtgcagctgcagaaggacgtgcgcccggcgtacgtgcccgcgcagaacctgttcagggaccgcagcggggaggagcccgaggagatgcgcgactgccggtttcgggcgggcagggagctgcgcgatggcctggaccgccagcgcgtgctgcgcgacgaggatttcgagccgaacgagcagacggggatcagccccgcgcgcgcgcacgtggcggcggccaacctggtgacggcctacgagcagacggtgaagcaggagcgcaacttccaaaagagtttcaacaaccacgtgcgcaccctgatcgcgcgcgaggaggtggccctgggtctgatgcacctgtgggacctggcggaggccatcgtgcagaacccggacagcaagcctctgacggcgcagctgttcctggtggtgcagcacagcagggacaatgaggcgttcagggaggcgctgctgaacatcgccgagcccgagggtcgctggctgctggagctgattaacatcttgcagagcatcgtagtgcaggagcgcagcctgagcctggccgagaaggtggcggcgatcaactactcggtgctgagcctgggcaagttttacgcgcgcaagatttacaagacgccttacgtgcccatagacaaggaggtgaagatagacagcttttacatgcgcatggcgctcaaggtgctgacgctgagcgacgacctgggcgtgtaccgcaacgaccgcatccacaaggccgtgagcacgagccggcggcgcgagctgagcgaccgcgagctgatgctgagcctgcgccgggcgctggtaggaggcgccaccggcggcgaggagtcctacttcgacatgggggcggacctgcattggcagccgagccggcgcgccttggaggccgcctacggtccagaggacttggatgaggatgaggaagaggaggaggatgcacccgttgcggggtactga

SEQ ID NO: 1000 - DNA, 1851 bp, Adenovirus D13
  MISC_FEATURE (1)..(1851): D13.orf00053 pTP
atggactatttcctgccgctgcgcaacatctggaaccgcgtccgcgagttcccgcgcgcctccaccaccgccgccggcatcacctggatgtcccgctacctctacggctaccaccgcctcatgctcgaggacctggccccgggcgcgccggccacccagcgctggccgctctaccgccagccgccgccgcacttcctagtgggctaccagtacctcgtgcgcacctgcaacgactacgtcttcgactcgcgcgccttctcgcggctcaggtactccgaggtcgtgcagcccggcctgcagaccgtcaactggtcgctcatggccaactgcacctacaccatcaacaccggggcctaccaccgcttcgtcgacatggacgacttccaggacaccctcacccgcgtgcaacaggccatcctcgccgagcgcgtcgtcgccgacctggcgctcgtgcagccgctcaggggcgtcggggtcacccgcatggaagactccgcctccgccagtgatgacatcgagaggctcatgcatgactactacaagaacctgagccggtgtcagggccaggcctggggcatggccgagcggctccgcatccagcaagcgggacccaaggacctggtcctcctcgccaccatccgccgcctcaaaaacgcctacttcaattacatcatcagcaaccgcaattctaacagcgtccacagggctgctacgtgtctgagcttaccttgcgactgcgattggctagacgctttcctcgaaagattctccgatccggtcgatctcgacgcgctcacgtcccctacaccgcaattgataagatgcatagtcagcgccctctcgctgcccaacggggacccgccccattaccgggagatgaccggcggcgtcttcacgctgcgtcctcgcgaacggggtcgcgccgtcaccgaaaccatgcgtcgccgccgcggggagatgatcgagcgcttcgtcgaccgtctcccggtgcgtcgccgtcgtcgtcgggccccgccaccaccgcccccagaggaagaaatagaagaggtcgtcatggaagaagaagaggaagaggaggaggcccccggggatttcgagcgcgaggtgcgcgccaccatcgccgagctcatccggctcctggaagacgagctcacggtctcggcccgcaacgcccagtttttcaacttcgccgtggacttctacgaggccatggaaaggctggaggccatcggcgacatcagcgagatgcccctgcgccgctggatcatgtacttctttgtcaccgagcacatcgccaccaccctcaactacctcttccagcgcctgcgcaactacgccgtcttcgcgcggcacgtggagctcaacttcgcgcaggtggtcatgcgcgcgcgagacgccgacggggacgtggtctacagccgcgtctggaacgagagcggcctgggcgccttctcgcagctcatgggtcgcatctccaacgacctcgccgccaccgtcgagcgcgcgggccgcggcgatctccaggaggaggagatcgagcagttcatgtccgagatcgcctaccaggacaactcgggcgacgtgcaagagatcctgcgtcaggccgccgtcaatgacgccgagattgattctgttgaactgtctttcaggttcaaagtcacggggcccgtggtcttcacgcagaggcggcagatccaggatgtcaaccgccgcgtcgtcgcgcacgccagcgctctcagggcgcagcaccgggacctgcccgagcgccacgccgacgtgcctctgccgcccctgcccgcggggccggaaccgccgctgccgccgggagcgcgtccgcgacaccgcttctaa

SEQ ID NO: 1001 - DNA, 3267 bp, Adenovirus D13
  MISC_FEATURE (1)..(3267): D13.orf00057 E2B DNA polymerase
gtggacacggccaccaactcacccgtagaaatcaagtaccatctgcatctcaagcacgccctcacccgcctctacgaggtcaacctcagaaccctgcccccggacctggatctccgcgacaccatggacagctcccaactgcgcgccctcgtcttcgctctccgcccccgccgcgccgagatctggacctggctcccgcgcgggctcgtcaacctctccgtcctcgaggagccccagggtgagtcccacgcaggcgaacatgaaaaccaccagccagggccgccactcctgaagttcctcctcaagggacgcgctgtgtatctcgtggatgaggtacagcccgtgcagcgctgcgagtactgcggacgcttttacaagcatcagcatgagtgctcggttcgccggcgggatttctactttcatcacatcaacagccactcgtccaactggtggcaggaaatccagttcttccccatcggctctcatcctcgcacggagcggctctttgtcacctacgatgtagaaacctacacctggatggggtccttcggcaagcagctcgtccccttcatgctggtcatgaaattctccggggaccccgagctggtcgccctcgctcgcgatctcgccgtgcgcttacgctgggatcgctgggagcgggaccccctcaccttctactgcgtcacccccgaaaagatggccgtgggccaacagttccgcctctttcgcgacgagctccagaccctcatggcccgcgagctctgggcttccttcatgcgtgccaacccacatctccaggagtgggcgctcgagcagcacggcctgcaatgccccgaggacctcacctacgaggagctcaaaaagctgccgcacatcaaaggccgcccgcgattcatggaactttacatcgtcgggcacaacatcaacggcttcgacgagatcgtcctcgccgcccaggtcatcaacaaccgagcctccgtcccgggccctttccgcatcacccgcaatttcatgccgcgggcaggcaagattctcttcaatgacgtcactttcgctctgcctaaccccctctcgaagaagcgcaccgatttcgagctctgggagcacggcggctgcgacgactcggatttcaagtaccagttcttgaaagtcatggtcagggacaccttcgccctgacgcacacctcgctccgcaaggccgctcaagcttacgccctcccggtggagaagggctgctgtccctacaaggccgtgaaccaattctacatgctgggctcttaccgtgcggacgatcgaggattcccgctccgggagtactggaaggatgacgaggagtacgccctcaaccgcgagctgtgggagaagaaaggagagccgggttatgacatcatccgcgaaacgctcgactactgcgccatggacgtcctcgtcaccgccgagctcgtcgccaagctgcaagactcctacgcgcacttcatccgcgactcggtccgcctgcctcacgcccactttaacatcttccaaaggcccaccatctcttccaactcgcatgccatctttcgccagatcgtcttccgcgccgagcagccgcaacgcaccaatctcggccccgcctttttggcaccctcgcacgagttgtatgactatgtgcgcgccagcatccgcggggggcgctgttatcccacctacatcggcatcctctcggagcccatctatgtctatgacatctgcggcatgtacgcctccgcgctcacgcatcccatgccctggggtccgcccctcaatccctacgagcgagcgctggccgcccgcgagtggcagatggccttggatgatgcatcctcaaaaatcgattattttgacaaggaactctgtccgggcatcttcactatcgatgcggacccccctgacgagcatctgcttgatgtgttgccccctttctgctcgcgcaagggcgggcgcctctgctggacgaatgagcccctgcgcggcgaggtggccaccagcgtggacctggtcaccctgcataaccgcggctggcgcgtcaggatcgtgccagacgagcgcaccaccgtcttccccgaatggaagtgcgtagcgcgcgagtatgtccagctcaacatcgcggccaaggagcgcgccgaccgtgacaaaaatcagaccatgagatccatcgccaagctactttcaaacgccctctatggctccttcgccaccaagcttgacaataaaaaaatagtcttttctgaccagatgaatgaaagtctcctgaaaagcatcgcggcagggcaagctaacatcaaatcctcctcgtttctagaaactgacaacctgagtgccgaggtcatgcccgctctcgagagggaatacttaccccaacagctggcgctcgtggacagcgacgcggaagagagtgaggacgagcacagacccgcccccttttatacccccccgtcggggacccccggtcacgtggcctacacctacaagccaatcaccttcttggatgcggaggagggggacatgtgcctgcacacggtggaaaaggtggaccccctggtggacaacgaccgctacccctcgcacgtggcctcctttgtcttggcgtggacgcgcgccttcgtctcagagtggtccgagtttctctacgaggaggaccgcgggacgcccctgcaggacaggcccatcaagtccgtctacggggacaccgacagcctgtttgtcaccgagcgcggacacagactcatggagacgcgaggtaagaagcgcatcaaaaagaacgggggaaaactggtttttgaccccgagcagcccgagctcacctggctcgtggagtgcgagaccgtctgcgcccactgtggagcggacgcctttgcccccgagtccgtctttctcgcgcccaagctctacgccttgcaatccctcctctgtcccgcctgcgggcgctcttccaaaggcaagctccgcgccaagggccacgccgccgaggccctcaactacgagctcatggtcaactgctatctcgccgacgcgcagggcgaagaccgtgcccgtttcagcaccagcaggatgagtctcaagcgcacccttgcaagcgcccagcccggggcccaccccttcaccgtgacggagaccacgctcacgcggaccctgagaccctggaaggacatgacgctggcagcgctggacgcccatcgtctcgtgccttacagtcgcagtcgtcccaacccccgaaacgaggaagtctgctggatcgagatgccgtag

SEQ ID NO: 1002 - DNA, 1041 bp, Adenovirus D13
  MISC_FEATURE (1)..(1041): D13.orf00058 pIVa2 IVa2
atggccgacgggctcaagcccctgaaaaactttgcttccctgcaagagctcctctcgctgggcggggaccgcctcctcggcgagctcgtccgggaaaacctccaagtcagggacatgcttaacgaggtggcccccctcctccgggacgacggcagctgcatctccttgaactaccacctgcaacccgtcatcggggtcatctacggcccgaccgggtgcggcaagtcccagctgttgagaaacctgctctcctcgcagctcatcacccccgccccggaaaccgtttttttcatcgccccgcaggtggacatgattcccccctccgagatgaaagcctgggagatgcagatatgcgaggggaatttcgccccggggcccgagggaaccattgtcccccaatctggcaccctccgccccaaattcattaaaatgtcttatgatgatctcacccaggagcataattacgatgtctctgatcccaggaacgtctttgccaaagccgcagcccacgggcccattgccatcatcatggatgagtgcatggaaaacctgggcgggcacaagggcgtctccaaattcttccacgcattcccttccaagttgcatgacaaattccccaagtgcacgggctacaccgtcctggtggtcctgcacaacatgaacccccggcgggatctgggcggcaatatcgccaacctcaagatccaggccaaactgcacatcatctccccccgcatgcatccctcccagctcaaccgcttcgccaacacctacaccaaggggctccccgtggccatcagtctcctcctcaaggacatcatccagcaccacgcccagcgcccctgctatgactggatcatctacaacacgaccccagagcacgaggccatgcagtggtgctacctccatccccgggacgggctcatgcccatgtacctcaacatccaatcccacctctaccgggtcttggaaaaaatccaccgcactctcaatgatcgggagaggtggaccagggcctatcgcgcgcgaaaaaataaataa

SEQ ID NO: 1003 - DNA, 408 bp, Adenovirus D13
  MISC_FEATURE (1)..(408): D13.orf00061 pIX protein
atgaacgggaccggcggggccttcgaaggggggcttttcagcccttatttgacaacccgcctgccgggatgggccggagttcgtcagaatgtgatgggatcgacggtggatgggcgcccagtgcttccagcaaattcctcgaccatgacctacgcgaccgtggggacgagctcgtcgctcgacagcaccgccgcagccgcggcagccgcagccgccatgacagcgacgagactggcctcgagctacatgcccagcagcggtagcagcccctccgtccccagttccatcatcgccgaggagaaactgctggccctgctggccgagctggaagccctgagccgccagctggccgccctgacccagcaggtgtccgagctccgcgagcaacagcagcagcaaaataaatga

SEQ ID NO: 1004 - DNA, 1497 bp, Adenovirus D13
  MISC_FEATURE (1)..(1497): D13.orf00062 E1B 55 kDa protein
atggagccaggacacccaactgagcaggggctacatcctggacttcgcagccatgcacctgtggagggcctggatcaggcagcggggacagagaatcttgaactactggcttctacagccagcagctccgggtcttcttcatctacacagacaaacatccatgttggaggaagaaatgagggaggccatggacgagaacccgaggagcggcctggaccctccgtcggaagaggagctggattgaatcaggtatccagcctatacccagagcttagcagggtcctgaccaacggatccataggtgcgaggggagtgaagagggagaggagcgatggtggcaataccgggatgatgaccgagctgactgccagcctgatgaatcgcaagcgcccagagtgcattacctggcatgagctacagatggagtgcagggatgaggtgggcctgatgcaggataaatatggcctggagcagataaaaactcactggttgaacccagatgaggattgggaggaggccattaagaagtatgctaagatagccctgcgcccagattgcaagtacaggatcactaagacggtgaatatcagacatgcctgctacatctcagggaatggggcagaggtggtcatcgataccctggacaagtctgccttcaggtgttgcatgatgggaatgagagccggtgtgatgaatatgaattccatgatcttcatgaacatgaagtttaatggagagaagtttaacggggtgctgttcatggccaacagccatatgaccctgcatggctgcaagttcttcggattcaacaatatgtgtgcagaggtgtggggctcagccaagatcaggggctgtgtgtattatggttgctggatgggcgtggtcggaagacccaagagcgagatgtctgtaaagcagtgtgtgtttgagaagtgctacctgggagtctctaccgagggcaatgctcgggtgagacactgttcttccatcgagacgggctgcttctgcctggtgaagggcacagcctcgctcaagcataatgtgatcaaggggtgcacggatgagcgcatgtacaacatgctgacctgcgactcgggtgtctgccatatcctgaagaacatccatatcacctcccacgctagaaagaagtggccagtgtttgagaataacatgctgatcaagtgccatgtgcacctgggtgtcagaaggggcaccttccagccgtaccagtgcaactttagccagaccaagctgctgctggagagcgatgccttctccagggtgaacctgaacggcatctttgacatggatgtctcggtgtacaagatcctgagatacgatgagaccaggtccagggtgcgcgcttgcgagtgcggaggcagacacaccaggatgcaaccagtggccctggatgtgaccgaggagctgaggcccgaccacctggtgatggcctgtaccgggaccgagttcagctccagcggggaggacacagattag

SEQ ID NO: 1005 - DNA, 249 bp, Adenovirus D13
  MISC_FEATURE (1)..(249): D13.orf00065 E1B 19 kDa protein
atgactcatgggcggggcttagtcctatataagtggcaacacctgggcactcaggcacagaccttcagggagttcctgatggatgtgtggactatccttgcggactttaacaagacacgccggcttgtagaggatagttcagacgggtgctccggtttctggagacactggtttggaactcctctatctcgcctggtgtacacagtaaagaaggattatcaggaggaatttgaaaatcttttttgctga

SEQ ID NO: 1006 - DNA, 207 bp, Adenovirus D13
  MISC_FEATURE (1)..(207): D13.orf00066 E1A 14.8 kDa protein
gtgtcagaggatgagtcatcgccctcagaagaagaccacccgtctccccctgagctgtcaggcgaaacgcccctgcaagtgcacagacccaccccagtcagacccagtggcgagaggcgagcagctgttgaaaaaattgaggacttgttgcatgacatgggtggggatgaacctttggacctgagcttgaaacgccccaggaactag

SEQ ID NO: 1007 - DNA, 558 bp, Adenovirus D13
  MISC_FEATURE (1)..(558): D13.orf00068 E1A 28 kDa protein
atgagacacctgcgccttctaccttcaactgtgcccggcgacctggctgtgataatgctggaggactttgtgaatacagttctggaggacgaactgcatccaacaccgttcgagctgggacccacacttcaggatctctatgatctggaggtagatgcccatgatgacgaccctaatgaagaggctgtgaatttaatatttccagaatctatgattctccaggctgacatagccagcgaagctgtagttactccacttcataccccgactctgccaccaatacctgaattggaagaggaggacgagctagaccttcggtgttatgaggaaggttttcctcccagcgattcagaggacgaacagggtgagcagagcatggctctaatctcagactatgcttgtgtgattgtggaggagcaagatgtgattgaaaaatctactgagccagtacaaggctgtaggaactgcaagtaccaccgggataagtccggagatccaaaagcctcatgtgctctgtgctatatgaaacagactttcagctttatttacagtaagtag

SEQ ID NO: 1008 - DNA, 378 bp, Adenovirus D17
  MISC_FEATURE (1)..(378): D17.orf00002 E4 14.0 kDa protein
atggctgaatctctgtatgctttcatagatagtcctggagggattgctcccgtccaggaaggggctagcaatagatataattttttttgccctgaatctttccacattcctccgcatggggtggtattgcttcacctaaaagtgagtgtgctggttcctactggatatcagggcagatttatggccttgaatgactaccatgccagggacatactaacccagtccgatgtgatttttgccggaagaagacaggaacttactgtgctgctttttaatcacacggaccgatttttgtatgtccgcaagggccacccagtgggtaccctgctgctggaaagagtgatttttccttcagtgaaaatagccaccttagtttag

SEQ ID NO: 1009 - DNA, 309 bp, Adenovirus D17
  MISC_FEATURE (1)..(309): D17.orf00003 E4 14.5 K E4 ORF2 14.5 kDa protein
atgattaaagaaaaactaccacgctttatcactcacattttggaaggcatcaccggagacacaaagagagcttattccagcatgcagtttttgggtgctagctttggagcattaaagttttccctcacgcttgccagtcccacgcttagccctggctctgaattgtcagctgtagtggcccaggacttaagtgactttttgcagctgacattgaggcgcgagctcagggcggagggcagaaccttattgaatcttgttgttttgaacacgctgcaggtggtggagcagcaggatctgtttctattatga

SEQ ID NO: 1010 - DNA, 354 bp, Adenovirus D17
  MISC_FEATURE (1)..(354): D17.orf00004 E4 13.5 kDa protein
atgaaggtctgcctgattatgaaagtggagggggcactgtgggagcttttcaacatgtgcggagtggatttacaccaacaatttgtagagataatccaaggctggaaaaatgagaattacctggggatggtgcaggaatgtaacctgatgattgatgaaatcgatggagggccagcctttaatgtgattcttatgctggatgtacgcgtagagccactgctcgaagccacggtcgagcaccttgaaaatagagtgggttttgacctggctgtctgtttccaccagcacagcggaggggaacgctgtcacctgcgtgacttgcactttatcgtccttcgagaccgtttggaataa

SEQ ID NO: 1011 - DNA, 879 bp, Adenovirus D17
  MISC_FEATURE (1)..(879): D17.orf00007 E4 34.1 kDa protein
atgcaaaccgagattcaatccagctcgctccgccatcatccatatcgcagggcccgtttaccacgatctgatgatgaaaccagggcttcactgactgatcaacatcccctgttgcccgattgtgatcatgcagattatcataatgtaagttctgtccgtggattaccatgtgctgctggctttaccctgctccaagagtttccagtcccctgggatatgatcctcaccacagaggaaataaaaattttaaaaagatgtatgtcagtgtgcctgtgccccgctaccctggacttggtaagagctcagatggtgagcgggtacgagcgctggatcctgcattgccactgttcatcccctggctccctgcagtgtcgggcgggaggcaccctgctggccgtgtggttcaggagagtcatttacgggtgcatgttcaaccagcgcttcccctggtaccgccagattgtaaacagaaacatgcccaaagagatcatgtatatgggcagtgtgttcatgaggggcaggcacctgatatactgccgcatctggtacgatggtcacgtgggttccatcatccccaacatgagctttggctggagcaccctgaattatgggctgctgaataacatggtgattatgtgctgcacttactgtgagaacatggcagagatcaggatgcggtgctgtgctcgacgcaccaggagactgatgctgaaggctgttgggatcatagttagagagacttgtgatcccgatcccatctgcagcagccgcaccgagccccggcggcagagactgctgagggcgctgatggagaggcacagacccatcctgttttccgagtatgaatctgtgcgttcttctcgttccaccagactgtga

SEQ ID NO: 1012 - DNA, 246 bp, Adenovirus D17
  MISC_FEATURE (1)..(246): D17.orf00009 E4 ORF6/7 protein
gtgaccttggactgtgaggcccgcttggatgacttttcagaggacggcttcatttcaatcaccgatccccgtttggctcgccaggaaactgtgtggattatagaccccaagtccagttcccgcactaatcagaacatttccctatttaaggccacccgtgctgagagaaccgtgtacactgtgaaatgggctggtggtgggagattgactactcgcgctggtgtaaaaatcaataaagatacataa

SEQ ID NO: 1013 - DNA, 1101 bp, Adenovirus D17; identical to SEQ ID NO: 150
  MISC_FEATURE (1)..(1101): D17.orf00011 L5 fiber

SEQ ID NO: 1014 - DNA, 150 bp, Adenovirus D17
  MISC_FEATURE (1)..(150): D17.orf00012 U protein
atgaaaattgtggaccaggaatttgacatccctttcaaggtgtggagaaagttcgccgcccgccggagactggagtaccagagttgggaggagggtaccgaggtgctgctgaacaactacaccagagacatactttcagatttcaagtaa

SEQ ID NO: 1015 - DNA, 393 bp, Adenovirus D17
  MISC_FEATURE (1)..(393): D17.orf00014 E3 14.8kDa protein
atgactgaccaccacctggacctcgagatggacggccaggcctccgagcagcgcatcctgcaactgcgcgtccgtcagcagcaggagcgtgccgccaaggagctcctcgatgccatcaacatccaccagtgcaagaagggcatcttctgcctggtcaaacaggcaaagatcacctacgagctcgtgtccaacggcaaacagcatcgcctcacctatgagatgccccagcagaagcagaagttcacctgcatggtgggcgtcaaccccatagtcatcacccagcagtcgggcgagaccaacggctgcatccactgctcctgcgaaagccccgagtgtatctactcccttctcaagaccctttgcggactccgcgacctcctccccatgaactga

SEQ ID NO: 1016 - DNA, 276 bp, Adenovirus D17
  MISC_FEATURE (1)..(276): D17.orf00017 E3 RID-alpha
atgattcctaggttcttcctatttaacatcctcttctgtctcttcaacatctgtgctgcctttgcggcagtttcgcacgcctcgcccgactgtctagggcctttccccacctacctcctctttgccctgctcacctgcacctgcgtctgcagcattgtctgcctggtcatcaccttcctgcagctcatcgactggtgctgcgcgcgctacaattaccttcatcatagtcccgaatacagggacgagaacgtagccagaattttaaggctcatatga

SEQ ID NO: 1017 - DNA, 813 bp, Adenovirus D17
  MISC_FEATURE (1)..(813): D17.orf00019 E3 34.1 kDa protein
atgaaggctttcacagcttgcgttctgattagcatagtcacacttagttcagctgcaatgattaatgttaatgtcactagaggtggtaaaattacattgaatgggacttatccacaaactacatggacaagatatcataaagatggatggaaaaatatttgtgaatggaatgttactgcatacaaatgcttcaataatggaagcattactattactgccactgccaacattacttctggcacatacaaagctgaaagctataaaaatgaaattaaaaaattaacctataaaaacaacaaaaccacatttgaagattctggaaattatgagcatcaaaaattatctttttatatgttgacaataattgaactgcctacaaccaaggcacccaccacagttagtacaactacacagtcaactgttaagaccactactcacactacacagctagacaccacagtgcagaataatactgtgttggttaggtatttgttgagggaggaaagtactactgaacagacagaggctacctcaagtgcctttatcagcactgcaaatttaacttcgcttgcttggactaatgaaaccggagtatcattgatgcatggccagccttactcaggtttggatattcaaattacttttctggttgtctgtgggatctttattcttgtggttcttctgtactttgtctgctgtaaagccagaaagaaatctaggaggcccatctacaggccagtgattggggaacctcagccactccaagtggatggaggcttaaggaatcttcttttctcttttacagtatggtga

SEQ ID NO: 1018 - DNA, 1263 bp, Adenovirus D17
  MISC_FEATURE (1)..(1263): D17.orf00020 E3 47.7 kDa protein
atgaatacagtgatccgtatcgtgctgctctctcttcttgtaacttttagtcaggcaggatttcataccatcaatgctacatggtgggctaatataactttagtgggaccctcagatattccagtcacatggtatgatagcactggattgcaattttgtgatggaagtacagttaagaatccacagatcagacatagttgtaatgatcaaaacttaactctgattcatgtgaacaaaacccatgaaagaacatacatgggctataataagcagagtactcataaagaagactataaagtcacagttataccacctcctcctgttactgtaaagccacaaccagagccagaatatgtgtatgttaatatgggagagaacaaaaccttagttgggcctccaggaattccagttagttggtttaatcaggatggtttacaattttgcattggggataaagtttttcatccagaattcaaccacacctgtgacatgcaaaatcttacactgttgtttataaatcttacacatgatggagcttatcttggttataatcgccagggaactgaaagaacttggtatgaggttgtagtgtcagatggttttccaaaatcagaagagatgaaggtagaagaccatagtaaagaaacagaacaaaaacagactggtcaaaaacaaagtgaccataagcagggtgggcaaaaagaaacaagtcaaaagaaaactaatgacaaacaaaagccatcgcgcaggaggccatctaaactaaagccaaacacacctgacacaaaactaattacagtcactagtgggtcaaacgtaactttagttggtccagatggaaaggtcacttggtatgatgatgatttaaaaagaccatgtgagcctgggtataagttagggtgtaagtgtgacaatcaaaacctaaccctaatcaatgtaactaaactttatgagggagtttactatggtactaatgacagaggcaacagcaaaagatacagagtaaaagtaaacactactaattctcaaagtgtgaaaattcagccgtacaccaggcctactactcctgatcagaaacacagatttgaattgcaaattgattctaatcaagacaaaattccatcaactactgtggcaatcgtggtgggagtgatcgcgggctttgtaactctaatcattattttcatatgctacatctgctgccgcaagcgtcccaggtcatacaatcatatggtagacccactactcagcttctcttactga

SEQ ID NO: 1019 - DNA, 306 bp, Adenovirus D17
  MISC_FEATURE (1)..(306): D17.orf00021 E3 17.5 kDa protein
atgggaaatgcatgggtgggcgactgggaaccaggagatgagcagaactacacggtcactgtccatggtagcaatggaaatcacacttttggtttcaaattcatttttgaagtcatgtgtgatatcacactgcatgtggctagacttcatggcttgtggccccctaccaaggataacatggttgggttttctttggcttttgtgatcatggcctgtgcaatgtcaggtctgctggtaggggctttagtgtggttcctaaagcgcaagcctaggtatggaaatgaggagaaggaaaaattgctataa

SEQ ID NO: 1020 - DNA, 573 bp, Adenovirus D17
  MISC_FEATURE (1)..(573): D17.orf00022 E3 22.2 kDa protein
gtgctgagtttaataaaagctaaactcctacaatactctgggatcccgtgtcgtcgcactcgcaacaagaccttcaacctcaccaaccagactgaggtaaaattcaactgcagaccgggggacaaatacatcctctggctttttaaaaacacttccttcgcagtctccaacgcctgcgccaacgacggtattgaaatacccaacaaccttaccagtggactaacttatactaccagaaagactaagctagtactctacaatccttttgtagagggaacctaccactgccagagcggaccttgcttccacactttcactttggtgaacgttaccgacagcagcacagccgctacagaaacatctaaccttctttttgatactaacactcctaaaaccggaggtgagctctgggttccctctctaacagaggggggtaaacatattgaagcggttgggtatttgattttaggggtggtcctgggtgggtgcatagcggtgctgtattaccttccttgctggatcgaaatcaaaatctttatctgctgggtcagacattgttgggaggaaccatga

SEQ ID NO: 1021 - DNA, 321 bp, Adenovirus D17
  MISC_FEATURE (1)..(321): D17.orf00023 E3 12.2 kDa protein
atgtcttatggtgactcggctgagctcgctcggttgaggcacctagaccactgccgccgcctgcgctgcttcgcccgggagagctgcggacttatctactttgagtttcccgaggagcaccccaacggccctgcacacggagtgcggatcaccgtagagggcaccaccgagtctcacctggttaggttcttcacccagcaacccttcctggtcgagcgggaccggggaggcaccacctacaccgtctactgcatctgtccaaccccgaagttgcatgagaatttttgttgtactctgtgtgctgagtttaataaaagctaa

SEQ ID NO: 1022 - DNA, 684 bp, Adenovirus D17
  MISC_FEATURE (1)..(684): D17.orf00024 L4 pVIII
atgagcaaggagattcccaccccttacatgtggagctatcagccccagatgggcctggccgcgggcgcctcccaggactactccacccgcatgaactggctcagtgccggcccctcgatgatctcacgggtcaacggggtccgtaaccatcgaaaccagatattgttggagcaggcggcggtcacctcaacgcccagggcaaagctcaacccgcgtaattggccctccaccctggtgtatcaggaaatccccgggccgactaccgtactacttccgcgtgacgcactggccgaagtccgcatgactaactcaggtgtccagctggccggcggcgcttcccggtgcccgctccgcccacaatcgggtataaaaaccctggtgatacgaggcagaggcacacagctcaacgacgagttggtgagctcttcaatcggtctgcgaccggacggagtgttccaactagccggagccgggagatcgtccttcactcccaaccaggcctacctgaccttgcagagcagctcttcggagcctcgctccggaggcatcggaaccctccagtttgtggaggagtttgtgccctcggtctacttcaaccccttctcgggatcgccaggcctctacccggacgagttcataccgaacttcgacgcagtgagagaagcggtggacggctacgactga

SEQ ID NO: 1023 - DNA, 219 bp, Adenovirus D17
  MISC_FEATURE (1)..(219): D17.orf00025 L4 20 kDa protein
ttgaccaccagggagctgaggaatcggatcttccccactctttatgccatttttcagcagagtcgaggtcagcagcaagagctcaaagtaaaaaaccggtctctgcgctcgctcacccgcagttgcttgtaccacaaaaacgaagatcagctgcagcgcactctcgaagacgccgaggctctgttccacaagtactgcgcgctcactcttaaagactaa

SEQ ID NO: 1024 - DNA, 141 bp, Adenovirus D17
  MISC_FEATURE (1)..(141): D17.orf00026 L4 encapsidation protein
gtgaaggtgacggtagtaatgcaacacgttgcgggggatgttcaccccgcgatggaagagcagatagcggcgggcgaaagcgatgttccccccgcagtcttgcaagcaggcgatgatcgcggctttgtgggccctccatga

SEQ ID NO: 1025 - DNA, 2199 bp, Adenovirus D17
  MISC_FEATURE (1)..(2199): D17.orf00028 L4 82.2 kDa protein
atggaggagcagccgcgtaagcaggagcaggaggaggacttaaccacccacgagcaacccaaaatcgagcaggacctgggcttcgaagagccggctcgtctagaacccccacaggatgaacaggagcacgagcaagacgcaggccaggaggagaccgacgctgggctcgagcatggctacctgggaggagaggaggatgtgctgctgaaacacctgcagcgccagtccctcatcctccgggacgccctggccgaccggagcgaaacccccctcagcgtcgaggagctgtgtcgggcctacgagctcaacctcttctcgccgcgcgtgccccccaaacgccagcccaacggcacctgcgagcccaacccgcgtctcaacttctatcccgtctttgcggtccccgaggcccttgccacctatcacatctttttcaagaaccaaaagatccccgtctcctgccgcgccaaccgcacccgcgccgacgcgctcctcgctctggggcccggcgcgcgcatacctgatattgcttccctggaagaggtgcccaaaatcttcgaagggctcggtcgggacgagacgcgcgcggcgaacgctctgaaagaaacagcagaggaagagggtcacactagcgccctggtagagttggaaggcgacaacgccaggctggccgtgctcaagcgcagcgttgagctcacccacttcgcctaccccgccgtcaacctcccgcccaaggtcatgcgtcgcatcatggatcagctaatcatgccccacatcgaggccctcgatgaaagtcaggagcagcgccccgaggacacccggcccgtggtcagcgatgagcagcttgcgcgctggcttggtacccgcgacccccaggccctggagcagcggcgcaagctcatgctggccgtggtcctggtcaccctcgagctcgaatgcatgcgacgctttttcagcgaccccgagaccctgcgcaaggtcgaggagaccctgcactacacttttaggcacggtttcgtcaggcaggcatgcaagatctccaacgtggagctgaccaacctggtctcctgcctgggaatcctgcacgagaaccgcctggggcagacagtgctccactcgaccctgaagggcgaggcgcggcgggactatgtccgcgactgcgtctttctctttctctgccacacatggcaagctgccatgggcgtgtggcagcagtgtctcgaggacgagaacctgaaggagctggacaagcttcttgctagaaacctcaaaaagctgtggacgggctttgacgagcgcaccgtcgcctcggacctggccgagatcgtcctccccgagcgcctgaggcagacgctgaaaggcgggctgcccgacttcatgagccagagcatgttgcaaaactaccgcactttcattctcgagcgatctgggatgctgcccgccacctgcaacgccttcccctccgactttgtcccgctgagctaccgcgagtgtcccccgccgctgtggagccactgctacctcttgcagctggccaactacatcgcctaccactcggatgttatcgaggacgtgagcggcgaggggctgctagagtgccactgccgctgcaacctgtgctctccgcaccgctccctggtctgcaacccccagctcctgagcgagacccaggtcatcggtaccttcgagctgcaaggtccgcaggagtccaccgctccgctgaaactcacgccggggttgtggacttccgcgtacctgcgcaaatttgtacccgaggactaccacgcccatgagataaagttcttcgaggaccaatcgcgcccgcagcacgcggatctcacggcctgcgtcatcacccagggcgcgatcctcgcccaattgcacgccatccaaaaatcccgccaagagtttcttttgaaaaagggtagaggggtctatctggacccccagacgggcgaggtgctcaacccgggtctcccccagcatgccgaggaagaagcaggagccgctagtggaggagatggaagaagaatgggacagccaggcagaggaggacgaatgggaggaggagacagaggaggaagaattggaagaggtggaagaggagcaggcaacagagcagcccgtcgccgcaccatccgcgccggcagccccggcggtcacggatacaacctccgcagctccggccaagcctcctcgtag

SEQ ID NO: 1026 - DNA, 1473 bp, Adenovirus D17
  MISC_FEATURE (1)..(1473): D17.orf00029 E2A DNA binding protein
atggccggcggcagtcaggacgtgcgccggttcatggagcgagaggccactccgccccggggccacgggtcggcgcgctatccgccggagcaggagaggagcccctcgccgccgccacctcctctgcccaccaagcgccgaaagtatcagcgggtgggctccgggtcttccgaggaggacgtggtccccgtggacagccctccaaaaaagaagcaagccagaaagaccaagcatgtgaccaaggtagaccccgacgaagagatgccccaggaagatgccgtgattgtgggagtgggattcagccagcctccggttctgttgaaggaaggcaaggacggaaaacgtatcgtcgagcccgcgacccccggtgtcctgaacgtgcgcaaccccctgagtctgcctctggtctcgtcctgggaaaagggcatggataccatgaacgtgctgatggaacgttaccgcgtcgacagcggcctgcgcgatgcttacaagctcatgcccgagcagaccgagatcttccaaaagatgtgccagacctggatgaacgaggaggcccgcggtctgcaactaaccttcaccacccagaagagctttagcaccatcatgggtcgcctcttgcaaggttacatcttcagccacagcgggatcgcgcacaagaactgggagtgcaccggcagtgccctgtgggatcacggctgcaccgaggtggaaggccagctcaagtgtctgcatggaacggtgatgatccacaaggaccacgtggtggagatggatgtgaccagcgagaacgggcagcgcgcgttgaaggagcaacccagcaaagccaaggtgacccagaaccgctggggaagaagcgtggtgcaactgaccagccatgacgcgcgctgctgcgtgcaggatgccgggtgcgggaataaccagttcagcgggaagagctgcggcctgtttttcagcgagggggccaaggcccaacaagctttcaagcagatcacggcctttgtcaaggccctctacccgaatatgcagcgcggcgcggggatgatgctgatgcccgtgcactgcgagtgtaaccacaagcctcagagcgtgccattcctgggtcgccaactgtgcaagatgaccccattcggcctgagcaacgccgaggatctggacaaggatcagatcagcgacaagagcgtgctggccagcgtaaagtaccccagtctgatggtgttccagtgctgcaaccccgtgtaccgcaactcgcgcgcgcagagcaccggtcccaactgcgatttcaagatatccgccccggacatgctgggcgccctgcagatgagccggcgtatgtggagcgagaccttccccgagaccccagtgcccaaactggtgatccccgagttcaagtggcagcccaagtaccagtaccgcaacgtggccctccccagcgcggcgcacaacgatgagcgcgagaaccccttcgacttttaa

SEQ ID NO: 1027 - DNA, 630 bp, Adenovirus D17
  MISC_FEATURE (1)..(630): D17.orf00031 L3 protease
atgagcggctccagcgaaagagagctcgcgtccatcgtgcgcgacctgggctgcgggccctactttttgggcacccacgacaagcgattcccgggctttcttgccggcgacaagctggcctgcgccatcgtcaacacggccggccgcgagaccggaggcgtgcactggctcgccttcggctggaacccgcgctcgcgcacctgctacatgttcgacccctttgggttctcggaccgccggctcaagcagatttacagcttcgagtacgaggccatgctgcgccgaagcgccctggcctcctcgcccgaccgctgtctcagcctcgaacagtccacccagaccgtgcaggggcccgactccgccgcctgcggacttttctgttgcatgttcttgcatgccttcgtgcactggcccgaccgacccatggacgggaaccccaccatgaacttgctgacgggggtgcccaacggcatgctacaatcgccacaggtgctgcccaccctcaggcgcaaccaggaggagctctatcgcttcctcgcgcgccactccccttactttcgctcccaccgcgccgccatcgaacacgccaccgcttttgacaaaatgaaacaactgcgtgtatctcaataa

SEQ ID NO: 1028 - DNA, 2865 bp, Adenovirus D17; identical to SEQ ID NO: 210
  MISC_FEATURE (1)..(2865): D17.orf00033 L3 hexon

SEQ ID NO: 1029 - DNA, 705 bp, Adenovirus D17
  MISC_FEATURE (1)..(705): D17.orf00034 L3 pVI
atggaagacatcaattttgcgtccctggctccgcggcacggcacgcggccgttcatgggcacctggaacgagatcggcaccagccagctgaacgggggcgccttcaattggagcagtgtctggagcgggcttaaaaatttcggctcgacgctccggacctatgggaacaaggcctggaatagtagcacggggcagttgttgagggaaaagctcaaagaccagaacttccagcagaaggtggtggacggcctggcctcgggcattaacggggtggtggacatcgcgaaccaggcagtgcagcgcgagataaacagccgtctggacccgcggccgcccacggtggtggagatggaagatgcaactcttccgccgccgaagggcgagaagcggccgcggccagatgcggaggagacgatcctgcaggtggacgagccgccctcgtacgaggaggccgtgaaggccggcatgcccaccacgcgcatcatcgcgccactggccacgggtgtaatgaaacccgccacccttgacctgcctccaccacccacgcccgctccaccgaaggcagctccggttgtgcagccccctccggtggcgaccgccgtgcgccgcgtccccgcccgccgccaggcccagaactggcagagcacgctgcacagtattgtgggcctgggagtgaaaagtctgaagcgccgccgatgctattga

SEQ ID NO: 1030 - DNA, 225 bp, Adenovirus D17
  MISC_FEATURE (1)..(225): D17.orf00035 L2 pX core protein L2 pX
atggctctcacttgccgcctgcgcatccccgttccgaattaccgaggaagatcccgccgcaggagaggcatggcaggcagcggcctgaaccgccgccggcggcgggccatgcgcaggcgcctgagtggcggctttctgcccgcgctcatccccataatcgcggcggccatcggcacgatcccgggcatagcttccgttgcgctgcaggcgtcgcagcgccgttga

SEQ ID NO: 1031 - DNA, 1008 bp, Adenovirus D17
  MISC_FEATURE (1)..(1008): D17.orf00037 L2 V
atgtcaaagcgcaaaatcaaggaggagatgctccaggtcgtcgccccggagatttacggaccaccccaggcggaccagaaaccccgcaaaatcaagcgggttaaaaaaaaggatgaggtggacgagggggcagtagagtttgtgcgcgagttcgctccgcggcggcgcgtaaattggaaggggcgcagggtgcagcgcgtgttgcggcccggcacggcggtggtgttcacgcccggcgagcggtcctcggtcaggagcaagcgtagctatgacgaggtgtacggcgacgacgacatcctggaccaggcggcagagcgggcgggcgagtttgcctacgggaagcggtcgcgcgaagaggagctgatctcgctgccgctggacgagagcaatcccacgccgagcctgaagcccgtgaccctgcagcaggtgctgccccaggcggtgctgctgccgagccgcgggatcaagcgcgagggcgagaacatgtacccgaccatgcagatcatggtgcccaagcgccggcgcgtggaggaagtgctggacaccgtgaaaatggatgtggagcccgaggtcaaggtgcgccccatcaagcaggtggcgccgggcctgggcgtgcagaccgtggacattcagatccccaccgacatggatgtcgacaaaaaaccctcgaccagcatcgaggtgcagaccgacgacccctggctcccagcctccaccgctaccgcttccacttctaccgtcgccacggtcaccgagcctcccaggaggcgaagatggggccccgccaaccggctgatgcccaactacgtgttgcatccttccattatcccgacgccgggctaccgcggcacccggtactacgccagccgcaggcgcccagccagcaaacgccgccgccgcaccgccacccgccgccgtctgccccccgcccgcgtgcgccgcgtaaccacgcgccggggccgctcgctcgttctgcccaccgtgcgctaccaccccagcatcctttaa

SEQ ID NO: 1032 - DNA, 591 bp, Adenovirus D17
  MISC_FEATURE (1)..(591): D17.orf00038 L2 VII
atgtctattctcatctcgcccagcaataacaccggctggggtattactaggcccagcagcatgtacggaggagccaagaaacgctcccagcagcaccccgtccgcgtccgcggccacttccgcgctccctggggcgcttacaagcgcgggcggactgccaccgccgccgccgtgcgcaccaccgtcgacgacgtcatcgactcggtggtcgccgacgcgcgcaactatactcccgccccctcgaccgtggacgcggtcattgacagcgtggtggccgacgcgcgcgactatgccagacgcaagagccggcggcgacggatcgccaggcgccatcggagcacgcccgccatgcgcgccgcccgagctctgctgcgccgcgccagacgcacgggccgccgggccatgatgcgagccgcgcgccgcgccgccactgcaccccccgcaggcaggactcgcagacgagcggccgccgccgccgccgccgcggccatctctagcatgaccagacccaggcgcggaaacgtgtactgggtgcgcgactccgtcacgggcgtgcgcgtgcccgtgcgcacccgtcctcctcgtccctga

SEQ ID NO: 1033 - DNA, 1458 bp, Adenovirus D17; identical to SEQ ID NO: 180
  MISC_FEATURE (1)..(1458): D17.orf00039 L2 penton

SEQ ID NO: 1034 - DNA, 228 bp, Adenovirus D17
  MISC_FEATURE (1)..(228): D17.orf00040 L2 penton
atgctgtttctgccctccgtaggagccatataccgcggaggcacaaacggaacctccagggtcgcctgcgccatcacgctctcgtacgagggaggaggagaggaagacaccaccgcacgcctcatctctaacaaggaagagaacgcacgctatggccttggtgagttttattttgcattcaaaacatccgtcgccccagtttgggctgcagatgcgcgaacgggttga

SEQ ID NO: 1035 - DNA, 1692 bp, Adenovirus D17
  MISC_FEATURE (1)..(1692): D17.orf00041 L1 IIIa
atgcagcaagccccggaccccgccataagggcggcgctgcaaagccagccgtccggtctagcatcggacgactgggaggctgcgatgcaacgcatcatggccctgacgacccgcaaccccgagtcctttagacaacagccgcaggccaacagactctcggccattctggaggcggtggtcccctctcggaccaaccccacgcacgagaaggtgctggcgatcgtgaacgcgctggcggagaacaaggccatccgtcccgacgaggccgggctagtgtacaacgccctgctggagcgcgtaggccgctacaacagcacaaacgtgcagtccaacctggaccggctggtgacggacgtgcgcgaggccgtggcgcagcgcgagcggttcaagaacgagggcctgggctcgctggtggcgctgaacgccttcctggcgacgcagccggcgaacgtgccgcgcgggcaggatgattacaccaactttatcagcgcgctgcggctgatggtgaccgaggtgccccagagcgaggtgtaccagtcgggcccggactactttttccaaactagcagacagggcctgcaaacggtgaacctgagccaggctttcaagaacctgcgcgggctgtggggcgtgcaggcgcccgtgggcgaccggtcgacggtgagcagcttgctgacgcccaactcgcggctgctgctgctgctgatcgcgcccttcaccgacagtggcagcgtaaaccgcaactcgtacctgggtcacctgctaacgctgtaccgcgaggccataggccaggcgcaggtggacgagcagaccttccaggagatcactagcgtgagccgcgcgctggggcagaacgacaccgacagtctgagggccaccctgaacttcttgctgaccaatagacagcagaagatcccggcgcagtacgcgctgtcggccgaggaggagcgcatcctgagatatgtgcagcagagcgtagggcttttcctgatgcaggagggggccactcccagcgccgcgctggacatgaccgcgcgcaacatggaacctagcatgtacgccgccaaccggccgtttatcaataagctaatggactacctgcatcgcgcggcgtccatgaactcggactactttaccaatgccattttgaacccgcactggcttccgccgccggggttctatacgggcgagtacgacatgcccgaccccaacgacgggtttttgtgggacgacgtggacagcgcggtgttttcaccgaccttgcaaaagcgccaggaggcggtgcgcacgcccgcgagcgagggcgcggtgggtcggagcccctttcctagcttagggagtttgcatagcttgccgggctctgtgaacagcggcagggtgagccggccgcgcttgctgggcgaggacgagtacctgaacgactcgctgctgcagccgccgcgggtcaagaacgccatggccaataacgggatagagagtctggtggacaaactgaaccgctggaagacctacgctcaggaccatagggagcctgcgcccgcgccgcggcgacagcgccacgaccggcagcggggcctggtgtgggacgacgaggactcggccgacgatagcagcgtgttggacttgggcgggagcggtggggtcaacccgttcgcgcatctgcagcccaaactggggcgacggatgttttga

SEQ ID NO: 1036 - DNA, 1125 bp, Adenovirus D17
  MISC_FEATURE (1)..(1125): D17.orf00042 L1 42.2 kDa protein
atgcatcccgtcctgcgccaaatgcgtcccacccccccggcgaccaccgcgaccgcggccgtagcaggcgccggcgctagccagccacagccacagacagagatggacttggaagagggcgaagggctggcgagactgggggcgccttccccggagcgacacccccgcgtgcagctgcagaaggacgtgcgcccggcgtacgtgcctgcgcaaaacctgttcagggaccgcagcggggaggagcccgaggagatgcgcgactgccggtttcgggcgggcagggagctgcgcgagggcctggaccgccagcgcgtgctgcgcgacgaggatttcgagccgaacgagcagacggggatcagccccgcgcgcgcgcacgtggcggcggccaacctggtgacggcctacgagcagacggtgaagcaggagcgcaacttccaaaagagtttcaacaaccatgtgcgcaccctgatcgcgcgcgaggaggtggccctgggcctgatgcacctgtgggacctggcggaggccatcgtgcagaacccggacagcaagcctctgacggcgcagctgttcctggtggtacagcacagcagggacaacgaggcgttcagggaggcgctgctaaacatcgccgagcccgagggtcgctggctgctggagctgatcaacatcttgcagagcatcgtagttcaggagcgcagcctgagcttggccgagaaggtggcggcaatcaactactcggtgcttagcctgggcaagttttacgcgcgcaagatttacaagacgccgtacgtgcccatagacaaggaggtgaagatagacagcttttacatgcgcatggcgctcaaggtgctgacgctgagcgacgacctgggcgtgtaccgcaacgaccgcatccacaaggccgtgagcgcgagccggcggcgcgagctgagcgaccgcgagctgatgctgagcctgcgccgggcgctggtagggggcgccgccggcggcgaggagtcctacttcgacatgggggcggacctgcattggcagccgagccggcgcgccttggaggccgcctacggtccagaggacttggatgaggaagaggaagaggaggaggatgcacccgctgcggggtactga

SEQ ID NO: 1037 - DNA, 1851 bp, Adenovirus D17
  MISC_FEATURE (1)..(1851): D17.orf00043 pTP
atggactatttcctgccgctgcgcaacatctggaaccgcgtccgcgagttcccgcgcgcctccaccaccgctgccggcatcacctggatgtcccgctacctctacggctaccaccgcctcatgctcgaggacctggccccgggcgcgccggccacccagcgctggccgctctaccgccagccgccgccgcacttcctagtcggataccagtaccttgtgcgcacctgcaacgactacgtcttcgactcgcgcgccttctcgcggctcaggtactccgaggtcgtgcagcccggcctgcagaccgtcaactggtcgctcatggccaactgcacttacaccatcaacacaggggcctaccaccgcttcgtcgacatggacgacttccaggacaccctcacccgcgtgcaacaggccatcctcgccgagcgcgtcgtcgccgacctggcgctcgtgcagccgctcaggggcgtcggggtcacccgcatggaagactccgcctccgccagtgatgacatcgagaggctcatgcatgactactacaagaacctaagccggtgtcagggccaggcctggggcatggccgagcggctccgcatccagcaagcgggacccaaggacctggtcctcctcgccaccatccgccgcctcaaaaacgcctacttcaattacatcattagcaaccgcaattctaacagcgtccacagggctgctacgtgtttgagcttaccttgcgactgcgattggctagacgctttcctcgaaagattctccgatccggtcgatctcgacgcgctcacgtcccctacaccgcaattgataagatgcatcgtcagcgccctctcgctgcccaacggggacccgccccattaccgggagatgaccggcggcgtcttcacgctgcgtcctcgcgaacggggtcgcgccgtcaccgaaaccatgcgtcgccgccgcggggagatgatcgagcgcttcgtcgaccgtctcccggtgcgtcgccgtcgtcgtcgggccccgccaccaccaccgcccccagaggaagaaatagaagaggttgtcatggaagaagaggaagaggacgaggcccccggggatttcgagcgcgaggtgcgcgccaccatcgccgagctcatcaggctcctggaagacgagctcacggtctcggcccgcaacgcccagtttttcaacttcgccgtggatttctacgaggccatggaaaggctggaggccatcggcgacatcagcgagatgcccctgcgccgctggatcatgtacttcttcgtcaccgagcacatcgccaccaccctcaactacctcttccagcgcctgcgcaactacgccgtcttcgcgcggcacgtggagctcaacctcgcgcaggtggtcatgcgcgcgcgcgacgccgacggggacgtggtctacagccgcgtctggaacgagagcggcctgggcgccttctcgcagctcatgggtcgcatctcgaatgacctcgccgccaccgtggagcgcgcgggtcgcggcgatctccaggaggaggagatcgagcagttcatgtccgagatcgcctaccaggacaactcgggcgacgtgcaagagatcctgcgtcaggccgccgtcaatgacgccgagattgattctgttgaactgtctttcaggttcaaagtcacggggccagtggtcttcacgcagaggcggcagatccaggatgtcaaccgccgcgtcgtcgcgcacgccagcgctctcagggcgcaacaccgggacctgcccgagcgccacgccgacgtgcctctgccgcccctgcccgcggggccggaaccgccgctgccgccgggagcgcgtccgcgacaccgcttctaa

SEQ ID NO: 1038 - DNA, 3300 bp, Adenovirus D17
  MISC_FEATURE (1)..(3300): D17.orf00046 E2B DNA polymerase
gtggccccgcgcagctacgggctcatgcaatgcgtggacacggccaccaactcacccgtagaaatcaagtaccatctgcatctcaagcacgccctcacccgcctctacgaggtcaacctcagaaccctgcccccggacctggatctccgcgacaccatggacagctcccaactgcgcgccctcgtcttcgctctccgcccccgccgcgccgagatctggacctggctcccgcgcgggctcgtcagcctctccgtcctcgaggagccccagggtgagtcccacgcaggcgaacatgaaaaccaccagccagggccgccactcctgaagttcctcctcaagggacgcgctgtgtatctcgtggatgaggtacagcccgtgcagcgctgcgagtactgcggacgcttttacaagcatcagcacgagtgctcggttcgccggcgggatttctactttcatcacatcaacagccactcgtccaactggtggcaggaaatccagttcttcccaatcggctctcatcctcgcacggagcggctctttgtcacctacgatgtagaaacctacacctggatggggtccttcggcaagcagctcgtccccttcatgctggtcatgaaattctcgggggacccagagctggtcgcccttgctcgcgatctagccgcgcgcttacgctgggatcgctgggagcgggaccccctcaccttctactgcgtcacacccgaaaagatggccgtgggccagcagttccgcctctttcgcgacgagctccagaccctcatggcccgcgagctctgggcttccttcatgcaagccaacccacatctccaggaatgggcgctcgagcagcacggcctgcaatgccccgaggacctcacctacgaggagctcaaaaagctgccgcacatcaaaggccgcccgcgattcatggaactctacatcgtcgggcacaacatcaacggcttcgacgagatcgtcctcgccgcccaggtcatcaacaaccgagcctccgtcccgggccctttccgcatcacccgcaatttcatgccgcgagcaggcaagattctcttcaatgacgtcactttcgctctgcctaaccccctctcgaagaagcgcaccgatttcgagctatgggagcacggcggctgcgacgactcggatttcaagtaccagttcttgaaagtcatggtcagggacaccttcgccctgacgcacacctcgctccgcaaggccgcacaagcttacgccctccccgtggagaagggctgctgtccctacaaggccgtgaaccatttctacatgctgggctcttaccgtgcggacgatcgaggattcccgctccgggagtactggaaggatgacgaggaatacgccctcaaccgcgagctgtgggagaagaaaggagaggcgggttatgacatcatccgcgaaacgctggactactgcgccatggacgtcctcgtcaccgccgagctcgtcgccaagctgcaagactcctacgcgcacttcatccgcgactcggtccgcttgccccacgcccactttaacatcttccaacggcccaccatctcctccaactcgcacgccatctttcgccagattgtcttccgcgccgagcagccccagcgcaccaatctcggccccgccttcttggccccctcgcacgagttgtatgactacgtgcgcgccagcatccgcggggggcgctgttatcccacctacatcggcatcctctcggagcccatctatgtctacgacatttgcggcatgtacgcctccgccctcacgcatcccatgccctggggtccgcccctcaacccctacgagcgagcaatggccgcccgcgagtggcagatggccttggatgatgcatcctcaaaaatagactattttgacaagaaactctgtcccggcatcttcaccatcgatgcggacccccctgacgagcatctgcttgatgtgctgcccccgttctgctcgcgcaagggcggcagactctgctggactaacgagcccctgcgcggcgaggtggccaccagcgtggacctggtcaccctgcataaccgcggctggcgcgtcaggatcgtgcccgacgagcgcaccaccgtctttcccgaatggaagtgtgtcgcgcgcgaatatgtccagctcaacatcgcggccaaggagcgcgccgaccgtgacaaaaatcagaccatgagatccatcgccaagcttctctccaacgccctctatggctcctttgccaccaagcttgacaataaaaaaatagtcttttctgaccagatggatgaaagtctcctaaaaagcattgcggcagggcaagccaacatcaaatcctcctcgtttctagaaactgacaacctgagtgccgaggtcatgcccgctctcgagagggaatacctaccccaacagctggcgctcgtggacagcgacgcggaagagagtgaggacgagcacagacccgcccccttttatacccccccgtcggggacccctggtcacgtggcctacacctacaagccaatcaccttcttggatgcggaggagggggacatgtgtctgcacacggtggaaaaggtggaccccctggtggacaacgaccgctacccctcgcacgtggcctcctttgtcttggcgtggacgcgcgcctttgtctcagagtggtccgagtttctctacgaggaggaccgcgggacgcccctgcaggacaggccaatcaagtccgtctacggggacaccgacagcctgtttgtcaccgagcgcggacacagactcatggagacgcgaggtaagaagcgcatcaaaaagaacgggggaaaactggtttttgaccccgagcagcccgagctcacctggctcgtcgagtgcgagaccgtctgcgcccactgcggagcggacgcttttgctcccgagtcggtctttcttgcgcccaagctctacgccctgcaatccctcctctgtcccgcctgcggacgctcttccaagggcaagctccgcgccaagggccacgccgccgaggccctcaactacgagctcatggtcaactgctatctcgccgacgcgcagggcgaagaccgtgcccgtttcagcaccagcaggatgagtctcaagcgcacccttgcaagcgcccagccaggggcccaccccttcaccgtgacggagaccaccctcacgcggaccctgagaccctggaaggacatgacgctggccgcgctggacgcccatcgtctcgtgccctacagtcgcagtcgtcccaacccccgaaacgaggaagtctgctggatcgagatgccgtag

SEQ ID NO: 1039 - DNA, 1047 bp, Adenovirus D17
  MISC_FEATURE (1)..(1047): D17.orf00047 pIVa2 protein
atgcccatggccgacggactcaagcccctgaaaaactttgcttccctgcaagagctcctctcgctgggcggggaccgcctcctcggcgagctcgtccgggaaaacctccaagttagagacatgctcaacgaggtggcccccctcctccgggacgacggcagctgcatgtccttgaactaccacctgcaacccgtcatcggggtcatctacggcccgaccgggtgcggcaagtcccagctgttgagaaacctgctctcctcgcagctcatcacccccgccccggaaaccgtttttttcatcgccccgcaggtggacatgatccccccctccgagatgaaagcctgggagatgcagatctgcgaggggaacttcgccccggggcccgagggaaccatcgtcccccaatctggcaccctccgcccaaaattcattaaaatgtcttatgatgatctcacccaggagcataattatgatgtctctgaccccagaaacgtctttgccaaagccgcagcccacgggcccatcgccatcatcatggatgagtgcatggaaaacctgggcgggcacaagggcgtctccaaattcttccacgcattcccttccaagttgcatgataagttccccaagtgcacgggctacaccgtcctggtggtcctgcacaacatgaacccccggcgggatctgggtggcaacatcgccaacctcaagatccaggccaaactgcacatcatctccccccgcatgcatccctcccagctcaaccgctttgccaacacctacaccaaggggctccccgtggccatcagtctcctcctcaaggacatcatccagcaccacgcccagcgcccctgctatgactggatcatctacaacacgaccccagagcacgaggccatgcagtggtgctacctccacccccgggacgggctcatgcccatgtacctcaacatccaatcccacctctaccgggtcttggaaaaaatccaccgcactctcaatgatcgggagaggtggaccagggcctaccgcgcgcgaaaaaataaataa

SEQ ID NO: 1040 - DNA, 402 bp, Adenovirus D17
  MISC_FEATURE (1)..(402): D17.orf00050 IX pIX
atgaacgggaccggcggggccttcgaaggggggctttttagcccttatttgacaacccgcctgccaggatgggccggagttcgtcagaatgtgatgggatcgacggtggacgggcgcccagtgcttccagcaaattcctcgaccatgacctacgcgaccgtggggaactcgtcgcttgacagcaccgccgcagccgcggcagccgcagccgccatgacagcgacgagactggcctcgagctacatgcccagcagcagcagtagcccctctgtgcccagttccatcatcgccgaggagaaactgctggccctgctggccgagctggaagccctgagccgccagctggccgccctgacccagcaggtgtccgagctccgcgaacagcagcagcaaaataaatga

SEQ ID NO: 1041 - DNA, 1488 bp, Adenovirus D17
  MISC_FEATURE (1)..(1488): D17.orf00052 E1B 55 kDa protein
atggagccagaacacccaactgagcaggggctacattctggacttcgcagccatgcacctgtggagggcatgggtcaggcagcggggacagagaatcttgaactactggcttctacagccagcagctccgggtcttcttcgtctacacagacaaacatccatgttggaggaagaaatgaggcaggccatggacgagaacccgaggagcggtctggaccctccgtcggaagaggagttggattgaatcaggtatccagcctgtacccagagcttagcaaggtgctgacatccatggccaggggagtgaagagggagaggagcgatgggggcaataccgggatgatgaccgagctgacggccagtctgatgaatcgcaagcgcccagagcgccttacctggtacgagctacagcaggagtgcagggatgagttgggcctgatgcaggataaatatggcctggagcagataaaaacccattggttgaacccagatgaggattgggaggaggctattaagaagtatgccaagatagccctgcgcccagattgcaagtacatagtgaccaagaccgtgaatatcagacatgcctgctacatctcggggaacggggcagaggtggtcattgataccctggacaaggccgcctttaggtgttgcatgatgggaatgagagccggagtgatgaatatgaattccatgatctttatgaacatgaagttcaatggagagaagtttaatggggtgctgttcatggccaacagccacatgaccctgcatggctgcgactttttcggctttaacaatatgtgcgcagaggtctggggcgcttccaagatcaggggatgtaagttttatggctgctggatgggcgtggtcggaagacccaagagcgagatgtctgtgaagcagtgtgtgtttgagaaatgctacctgggagtctctaccgagggcaatgctagagtgaggcactgctcttccctggagacgggctgcttctgcctggtgaagggcacagcctctctgaagcataatatggtgaagggctgcacggatgagcgcatgtacaacatgctgacctgcgactcgggggtctgtcatatcctgaagaacatccatgtgacctcccaccccagaaagaagtggccagtgtttgagaataacatgctgatcaagtgccacatgcacctgggcgccagaaggggcaccttccagccgtaccagtgcaactttagccagaccaagctgctgttggagaacgatgccttctccagggtgaacctgaacggcatctttgacatggatgtctcggtgtacaagatcctgagatacgatgagaccaagtccagggtgcgcgcttgcgagtgcgggggcagacacaccaggatgcagccagtggccctggatgtgaccgaggagctgagaccagaccacctggtgatggcctgtaccgggaccgagttcagctccagtggggaggacacagattag

SEQ ID NO: 1042 - DNA, 207 bp, Adenovirus D17
  MISC_FEATURE (1)..(207): D17.orf00056 E1A 14.8 kDa protein
gtgtcagaggatgagtcatcaccctcagaagaagaccacccgtgtccccctgagctgtcaggcgaaacgcccctgcaagtgcacagacccaccccagtcagacccagtggcgagaggcgagcagctgttgaaaaaattgaggacttgttacatgacatgggtggggatgaacctttggacctgagcttgaaacgtcccaggaactag

SEQ ID NO: 1043 - DNA, 588 bp, Adenovirus D17
  MISC_FEATURE (1)..(588): D17.orf00057 E1A 28.2 kDa protein
gtgagaaaaatgagacacctgcgcctcctgcctggaactgtgcccttggacatggccgcattattgctggatgactttgtgagtacagtattggaggatgaactgcaaccaactccgttcgagctgggacccacacttcaggacctctatgatttggaggtagatgcccaggaggacgacccgaacgaagatgctgtgaatttaatatttccagaatctctgattcttcaggctgacatagccagcgaagctctacctactccacttcatactccaactctgtcacccatacctgaattggaagaggaggacgagttagacctccggtgttatgaggaaggttttcctcccagcgattcagaggacgaacagggtgagcagagcatggctctaatctcagactatgcttgtgtggttgtggaagagcattttgtgttggacaatcctgaggtgcccgggcaaggctgtaaatcctgccagtaccaccgggataagaccggagacacgaacgcctcctgtgctctgtgttacatgaaaaagaacttcagctttatttacagtaagtggagtgaatgtgagagaggctga

SEQ ID NO: 1044 - DNA, 378 bp, Adenovirus D20
  MISC_FEATURE (1)..(378): D20.orf00002 E4 ORF1 protein
atggctgaatctctgtatgctttcatagatagccctggagggattgctcccgtccaggaagggactagcaatagatataatttcttttgccctcaatctttccacattcctccgcatggggtggtattgcttcacctaaaagtgagtgtgctggttcctactggatatcagggcagatttatggccttgaatgactaccatgccagggacatactaacccagtccgatgtgatctttgccgggagaagacaggagcttactgtgctgctctttaatcacacggaccgatttttgtatgttcgcaagggccacccagtgggtaccctgctgctggagagagtgatttttccttcagtgaaaatagccaccttagtttag

SEQ ID NO: 1045 - DNA, 393 bp, Adenovirus D20
  MISC_FEATURE (1)..(393): D20.orf00003 E4 ORF2 protein
atgcttcagcgacgcggtgtaagctaccacattgtggtccctggggtcctagtgacttatttagaggacttttctattacgcaaatgattaaagaaaaactaccacgctttatcacttacattttggaaggcatcaccggagacacaaagagagcttattccagcatgcagtttttgggtgctagctttggagcattaaagttttccctcacgcttgccagtcccacgcttagccctggctctgaattgtcagctgtagtggcccaggacttaagtgactttttgcagctgacattgaggcgtgagctcagggcggagggcagaaccttattgaatcttgttgttttgaacacgctgcaggtggtggagcagcaggatctgtttctattatga

SEQ ID NO: 1046 - DNA, 354 bp, Adenovirus D20
  MISC_FEATURE (1)..(354): D20.orf00005 E4 13.6 K E4 ORF 3 13.6 kDa protein
atgaaggtctgcctgattatgaaagtggagggggcactgtgggagcttttccacatgtgcggagtggacttacatcaacaatttgtagaaataatccaaggctggaaaaatgagaattacctggggatggtgcaggaatgtaacctgatgattgatgaaatcgatggagggccagcctttaatgtgattcttatgttggatgtacgcgtagagccactgctcgaagccacagtcgagcaccttgaaaatagagtgggttttgatctggctgtatgtttccaccagcacagcggcggggaacgctgtcacctgcgtgacttgcactttatcgtccttcgagaccgcttggaataa

SEQ ID NO: 1047 - DNA, 879 bp, Adenovirus D20
  MISC_FEATURE (1)..(879): D20.orf00009 E4 34.1 kDa protein
atgcaaaccgagattcaatccagctcgctccgccatcatccatatcgcagggcccgtttaccacgatctgatgaggagaccagggcttcactgactgaacaacatcccctgttgcccgattgtgatcatgcagattatcataatgtaagttctgtccgtggattaccatgtgctgctggctttaccctgctccaagagtttccagtcccctgggatatgatcctgaccccagaggaaataaaaattttaaaaagatgtatgtcagtgtgcctgtgccccgctaccctggacttggtaagagctcagatggtgagcgggtacgagcgctggatcctgcattgccactgttcatccccgggctctctgcagtgtcgggcgggaggcaccctgctggccgtgtggttcaggagagtcatttacgggtgcatgttcaaccagcgtttcccatggtaccgtcagattgtgaacagagacatgcccaaagagatcatgtatatgggcagtgtgtttatgaggggcaggcacctgatatactgccgcatctggtacgacggtcacgtgggttccatcatccccaacatgagctttggctggagcaccctgaattatgggctgctgaataacatggtgattatgtgctgcacttactgtgagaacatggcagagatcaggatgcggtgctgtgcccgacgcaccaggagactgatgctaaaggctgtggggatcatagtcaaagagacttgcgatcccgatcccatctgcagcagccgcaccgagccccggcggcagagactgctaagggcgctgatggagaggcacagacccatcctgttttccgagtatgaatctgtgcgttcttctcgttccaccagactgtga

SEQ ID NO: 1048 - DNA, 123 bp, Adenovirus D20
  MISC_FEATURE (1)..(123): D20.orf00011 E4 ORF6/7 protein
atgaattatgtatctttattgatttttacaccagcacgggtagtcagtctcccaccaccagcccatttcacagtgtacacggttctctcagcacgggtggccttaaatagggaaatgttctga

SEQ ID NO: 1049 - DNA, 1140 bp, Adenovirus D20; identical to SEQ ID NO: 151
  MISC_FEATURE (1)..(1140): D20.orf00013 L5 fiber

SEQ ID NO: 1050 - DNA, 150 bp, Adenovirus D20
  MISC_FEATURE (1)..(150): D20.orf00014 U protein
atgaaaattgtggaccaagaatttgacatccctttcaaggtgtggaggaagtttgccgcccgccggggactggagtaccagagctgggaggagggcaccgaggtgctgctgaacaactacaccagagacatactttcagatttcaagtga

SEQ ID NO: 1051 - DNA, 393 bp, Adenovirus D20
  MISC_FEATURE (1)..(393): D20.orf00016 E3 14.7 kDa protein
atgactgaccaccacctggacctcgagatggacggccaggcctccgagcagcgcatcctgcaactgcgcgtccgtcagcagcaggagcgggccgccaaggagctcctcgatgccatcaacatccaccagtgcaagaagggcatcttctgcctggtcaaacaggcaaagatcacctacgagctcgtgtccggcggcaagcagcatcgcctcgcctatgagctgccccagcagaagcagaagttcacctgcatggtgggcgtcaaccccatagtcatcacccagcagtcgggcgagaccagcggctgcatccactgctcctgcgaaagccccgagtgcatctactccctgctcaagaccctttgcggactccgcgacctcctccccatgaactga

SEQ ID NO: 1052 - DNA, 393 bp, Adenovirus D20
  MISC_FEATURE (1)..(393): D20.orf00018 E3 RID-beta
atgcagactctgctcatactgctagccctcctatcccctgtcctcacaacttatgctgattactctaaatgcaaattcgcggacatatggaatttcttagattgctatcaggagaaaattgatatgccatcctattacttggtgattgtgggaatagtcatggtctgctcctgcactttctttgccatcatgatctacccctgttttgatctcggttggaactctgttgaggcattcacatacacactagaaagcagttcactagcctccacgccaccacccacaccgcctccccgcagaaatcagtttcccatgattcagtacttagaagagccccctccccggcccccttccactgttagctactttcacataaccggcggcgatgactga

SEQ ID NO: 1053 - DNA, 276 bp, Adenovirus D20
  MISC_FEATURE (1)..(276): D20.orf00019 E3 10.4 K E3 ORF 4 10.4 kDa protein
atgattcctaggttcttcctatttaacatcctcttctgtctattcaacatctgcgctgccttcgcggccgtctcgcacgcctcgcccgactgtctagggcctttccccacctacctcctatttgccctgctcacctgcacctgcgtctgcagcattgtctgcgtggtcatcaccttcctgcagctcatcgactggtgctgcgcgcgctacaattacctgcatcatagtcccgaatacagggacgagaacgtagccagaatcttaaggctcatctga

SEQ ID NO: 1054 - DNA, 801 bp, Adenovirus D20
  MISC_FEATURE (1)..(801): D20.orf00021 E3 CR1-gamma
atgaaggctttcacagcttgcgttctgattagtttagtcacacttagtctatctcaaattatcaatgttaatgttaccagaggtggtagcatcacattaaatggaacctatccgcaaactacatggacaagatatcacacaaatggatggaaaaaaatatgtgaatggaatgttacagcctataaatgcttcagtaatggaagcattacaattactgccactgctaatattacttctggcaaaatcaaggcagaaagctataaaaatgaaattaagaaaatggtatataggaataacaagacaacatttgaagattctggagattatgaatatcagaaattatctttttatatgctaacaattattgagcttccaactactaaggctcccaccacaattaggacaactgttgagaccactactcacactacgcagttagacactacagtacagaatagtactgtattggttaggtttttgttgagggaggaaagtactactgaacagacagaggctacctcaagtgccttcagcagcactgcaaatttaacttcgcttgcttggactaatgaaaccggagtatcattgatgcatggccagccttactcaggtttggatattcaaattacttttctggttgtctgtggaatctttattcttgtggttcttctgtactttgtctgctgcaaagccagagagaaatctaggaggcccatctacaggccagtgattggggaacctcagcccctccaagtggatggaggcttaagaaatcttctcttctcttttacagtatggtga

SEQ ID NO: 1055 - DNA, 1275 bp, Adenovirus D20
  MISC_FEATURE (1)..(1275): D20.orf00022 E3 CR1-beta
atgaatacagtgatccgtatcgtgctgctctctcttcttgtagcttttagtcaggcagaatttcatactatcaatgctacatggtgggataatataactttagtgggaccctcagatattccagtcacatggtatgatagcactggattgaaattttgtgatggaagtacagttaagaatccacagatcagacatagttgtaatgaacaaaacttaactctgattcatgtgaacaaaacccatgaaagaacatacatgggctataataaacagagtactcataaggaagactataaagttatagtaatacctcctcctcctcctgctactgtaaagccacaaccagaaccagaatatgtgtttatttatattggagacaacaaaactctagaaggtcctccaggtcctccagtcacttggtttaatcaggatggaaagaaattttgcgaaggggaaagagtttatcatccagaatacaatcacacatgtgacaaacaaaaccttatactgctgtttgtaaattttacacatgatggagcttatcttggttacaattatcaaggaactcaaaggacacagtatgaggttacagtcttagatctttttccaaactctggtcaaatgaaaattgaagaacatagtgaggaaacagaacaaaagaatgggcaaaagcaaaatgaagaacaaaaacatggtgatcaaaaaacaagtcaaacaaaagttaatgacaggcgaaaagcagcgcagaaaagaccatcaaagctaaaaccagcaactattgagacaatgcttgttacagtaactgctggttctaacttaactttagttgggcctaaaccagaaggaaaagttacttggttcgatggagatttaaaaagaccatgtgagcctaattatagactgagacatgaatgtaatactcaaaacttaactctaatcaatgtaactaaaggttatgagggaacttactatggtactaatgacaaagatgaaggcaaaaggtacagagtgaaagtaaatactacaaattctcaagctgtaaaaattcagccatataccagacctactactcctgatcagaatcacaaatttgaaatgcaaattgaaaatggaaatgacgaatcaaaaataccctcaactactgtggcaattgtggtgggtgtgattgcgggcttcataactctaatcattgtctttatatgctacatctgctgccgcaagcgtcccaggtcatacaatcatatggtagacccactactcagcttctcttactga

SEQ ID NO: 1056 - DNA, 474 bp, Adenovirus D20
  MISC_FEATURE (1)..(474): D20.orf00025 E3 gp 17.6 kDa protein
atgaaggggctcttgctgattatcctttccctggtggggggtgtactgtcatgccacgaacagccacgatgtaacatcaccacaggcaatgagaggagtgtgatatgcacagtagtcatcaaatgcgaacataaatgccctctcaacatcacattcaaaaaccgtaccatggggaatgcatgggtgggcgactgggaaccaggagatgagcagaactacacggtcactgtccatggtagcaatggaaatcacactttcggtttcaaatttatttttgaagttatgtgtgatatcacactgcatgtggctagacttcatggcttgtggccccctaccaaggataacatggttgggttttctttggcttttgtgatcatggcctgtgcaatgtcaggtctgctggtaggggctataatgtggttcctgaggcacaagcccaggtacggaaatctggaaaaggaaaaattgctataa

SEQ ID NO: 1057 - DNA, 597 bp, Adenovirus D20
  MISC_FEATURE (1)..(597): D20.orf00026 E3 CR1-alpha
atgagaatttttgctgtactctgtgtgctgagtttaataaaagctaaactcctacaatactctgggatcccgtgtcgtcgcactcgcaacgagaccttcaacctcaccaaccagactgaggtaaaactcaactgcaagccaggagataaatatatcctctggctctttgaaaacacttcattcgcagtctccaacacctgcgccaacgacggtattgaaatacccaacaaccttaccagtggactaacttacactaccagaaagactaagctagtactctacaatccttttgtagagggaacctaccactgccagagcggaccttgcttccacactttcactttggtgaacgttaccgacagcagcacagccgctccagaaacatctaaccttctttctgatactaacactcctaaaaccggaggtgagctctgggttccctctctaacagaggggggtaaacatattgaagcggttgggtatttgattttaggggtggtcctgggtgggtgcatagcggtgctgtattaccttccttgctggatcgaaatcaaaatctttatctgctgggtcagacattgttgggaggaaccatga

SEQ ID NO: 1058 - DNA, 321 bp, Adenovirus D20
  MISC_FEATURE (1)..(321): D20.orf00027 E3 12.2 kDa protein
atgtcccatggtgactcggctgagcttgctcggttgaggcatctggaccactgccgccgcctgcgctgctttgcccgggagagctgcggactcatctactttgagtttcccgaggagcaccccaacggacctgcacacggagtgcggatcaccgtagagggcaccaccgagtctcacctggtcaggttcttcacccagcagcccttcctggtcgagcgggaccggggcgccaccacctacaccgtctactgcatctgtccaaccccgaagttgcatgagaatttttgctgtactctgtgtgctgagtttaataaaagctaa

SEQ ID NO: 1059 - DNA, 684 bp, Adenovirus D20
  MISC_FEATURE (1)..(684): D20.orf00028 L4 pVIII
atgagcaaggagattcccaccccttacatgtggagctatcagccccagatgggcctggccgcgggcgcctcccaggactactccacccgcatgaactggctcagtgccggcccttcgatgatctcacgggtcaacggggtccgtaaccatcgaaaccaaatattgttggaacaggcggcggtcacctccacgcccagggcaaagctcaacccgcgtaattggccctccaccctggtgtatcaggaaatccccgggccgactaccgtactacttccgcgtgacgcactggccgaagtccgcatgactaactcaggtgtccagctggccggcggcgcttcccggtgcccgctccgcccacaatcgggtataaaaaccctggtgatccgaggcagaggcacacagcttaacgacgagttggtgagctcttcgatcggtctgcgaccggacggagtgttccaactagccggagccgggagatcgtccttcactcccaaccaggcctacctgaccttgcagagcagctcttcggagcctcgctccggaggcatcggaaccctccagttcgtggaggagtttgtgccctcggtctacttcaaccccttctcgggatcgccaggcctctacccggacgagttcataccgaacttcgacgcagtgagagaagcggtggacggctacgactga

SEQ ID NO: 1060 - DNA, 219 bp, Adenovirus D20
  MISC_FEATURE (1)..(219): D20.orf00029 L4 20 kDa protein
ttgaccaccagagagctgaggaaccggatcttccccactctttatgccatttttcagcagagtcgaggtcagcagcaagagctcaaagtaaaaaaccggtctctgcgctcgctcacccgcagttgcttgtaccacaaaaacgaagatcagctgcagcgcactctcgaagacgccgaggctctgttccacaagtactgcgcgctcactcttaaagactaa

SEQ ID NO: 1061 - DNA, 2199 bp, Adenovirus D20
  MISC_FEATURE (1)..(2199): D20.orf00033 L4 100 kDa protein
atggaggagcagccgcgtaagcaggagcaggaggaggacttaaccacccacgagcaacctaaaatcgagcaggacctgggcttcgaagagccggctcgtctagaacccccacaggatgaacaggagcacgagcaagacgcaggccaggaggagaccgacgctgggctcgagcatggctacctgggaggagaggaggatgtgctgctgaaacacctgcagcgccagtccctcatcctccgggacgccctagccgaccggagcgaaacccccctcagcgtcgaggagctgtgtcgggcctacgagctcaacctcttctcgccgcgcgtgccccccaaacgccagcccaacggcacatgcgagcccaacccgcgtcttaacttctatcccgtctttgcggtccccgaggccctggccacctatcacatctttttcaagaaccaaaagatccccgtctcctgccgcgccaaccgcacccgcgccgacgcgctcctcgctctggggcccggcgcgcgcatacctgatatcgcttccctggaagaggtgcccaagatcttcgaagggcttggtcgggacgagacgcgcgcggcaaatgctctgaaagaaacagcagaggaagagggtcacactagcgccctggtagagttggaaggcgacaacgccaggctggccgtgctcaagcgcagcgtcgagctcacccacttcgcctaccccgccgtcaacctcccgcccaaggtcatgcgtcgcatcatggatcagctcatcatgccccacatcgaagccctcgatgaaagtcaggagcagcgccccgaggacgcccggcccgtggtcagcgacgagcagctcgcgcgttggctcgggacccgcgacccccaggctttggaacagcggcgcaagctcatgctggccgtggtcctggtcaccctcgagctcgaatgcatgcgccgcttcttcagcgaccccgagaccctgcgcaaggtcgaggagaccctgcactacacttttagacacggtttcgtcaggcaggcatgcaagatctccaacgtggagctgaccaacctggtctcctgcctggggatcctgcatgagaaccgcctggggcagaccgtgctccactctaccctgaagggcgaggcgcggcgggactatgtccgcgactgcgtctttctctttctctgccacacatggcagtcggccatgggagtgtggcagcagtgtctcgaggacgagaacctgaaggagctggacaagcttcttgctagaaaccttaaaaagctgtggacgggcttcgacgagcgcaccgtcgcctctgacctggccgagatcgtgttccccgagcgcctgaggcagacgctgaaaggcgggctgcctgacttcatgagccagagcatgttgcaaaattaccgcactttcattctcgagcggtctgggatgctgcccgccacctgcaacgccttcccctccgactttgtcccgctgagctaccgcgagtgtcccccgccgctgtggagccactgctacctcttgcagctggccaactacatcgcctaccactcggacgtgatcgaggacgtgagcggcgaggggctgctcgagtgccactgccgctgcaacctgtgctccccgcaccgctccctggtctgcaacccccagctcctgagcgagacccaggtcatcggtaccttcgagctgcaaggtccgcaggagtccaccgctccgctgaaactcacgccggggttgtggacttccgcgtacctgcgcaaatttgtacccgaggactaccacgcccatgagataaagttcttcgaggaccaatcgcgcccgcagcacgcggatctcacggcctgcgtcatcacccagggcgcgatccttgcccaattgcacgccatccaaaaatcccgccaagagtttcttctgaaaaagggtagaggggtctacctggacccccagacgggcgaggtgctcaacccgggtctcccccagcatgccgaggaagaagcaggagccgctagtggaggagatggaagaagaatgggacagccaggcagaggaggacgaatgggaggaggagacagaggaggaagaattggaagaggtggaagaggagcaggcaacagagcagcccgtcgccgcaccatccgcgccggcagccccgccggtcacggatacaacctccgcagctccggccaagcctcctcgtag

SEQ ID NO: 1062 - DNA, 1470 bp, Adenovirus D20
  MISC_FEATURE (1)..(1470): D20.orf00034 E2A DNA-binding protein
atggccggcggcagtcaggacgtgcgccggttcatggaccgagaggccactccgccccggggccacggttcagcgcgctatccgccggagcaggaaaggagcccctcgccgccgcctcctctgcccaccaagcgccgaaagtatcagcgggtgggctccgggtcttccgaggaggacgtggtccccgtggacagccctccaaaaaagaagcagcccagaaagaccaagcatgtgaccaaggtagaccccgacgaagagatgccccaggaagatgccgtgatcgtgggagtgggattcagccagccgccggttctgttgaaggaaggcaaggacggaaaacgcatcgtcgagccagcgacccccggtgtcctaaacgtgcgcaaccccctgagtctgcctctggtctcgtcttgggagaagggcatggataccatgaacgtgctgatggaacgctaccgcgtcgacagcggcctgcgcgatgcttacaagctcatgcccgagcagaccgagatcttccaaaagatgtgccagacctggatgaacgaggaggcccgcggtctgcaactgaccttcaccacccagaaagcatttagcaccatcatgggtcgcctcttgcaaggttacatcttcagccacagcgggatcgcgcacaagaactgggagtgcaccggatgcgtcctgtgggatcacggctgcaccgaggtggaaggccagctcaagtgtctgcatggaacggtgatgattcacaaggaccacgtggtggagatggatgtaaccagtgagaacgggcagcgcgcgctgaaggagcaacccagcaaggccaaggtgacccagaaccgctggggacggagcgtggtgcaactgaccagccatgacgcgcgctgctgcgtgcaggatgccggatgcgggaataaccagttcagcgggaagagctgcggcctgtttttcagcgagggggccaaggcccagcaagctttcaagcagatcgcggcctttgtcaaggccctctacccgaatatgcagcgcggcgcgggaatgatgctaatgcccgttcactgcgagtgtaaccacaagcctcagagcgtgcccttcctgggccgccagctgtgcaagatgaccccgttcggcctcagcaacgccgaggacctggacaaggatcagatcagcgacaagagcgtgcttgccagtgtgaagtaccccagtctgatggtgttccagtgctgcaaccccgtgtaccgcaactcgcgcgcgcaaaacaccggccccaactgcgatttcaagatctccggcccggacatgctgggcgccctgcagatgagccggcgcatgtggagcgagaccttccccgagaccccagtgcccaaactggtgatccccgagttcaagtggcagcccaagtaccagtaccgcaacgtggccctccccagcgcggcgcacaacgacgagcgcgagaacccctttgacttttaa

SEQ ID NO: 1063 - DNA, 630 bp, Adenovirus D20
  MISC_FEATURE (1)..(630): D20.orf00035 L3 23.6 kDa protease
atgagcggctccagcgaacgagagctcgcggccatcgtgcgcgacctgggctgcgggccctactttttgggcacccacgacaagcgcttcccgggctttctcgccggcgacaagctggcctgcgccatcgtcaacacggccggccgcgagaccggaggcgtgcactggctcgcctttggctggaacccgcgctcgcgcacctgctacatgttcgacccctttgggttctcggaccgccggctgaagcagatttacagcttcgagtacgaggccatgctacgccgcagcgccctggcctcctcgcccgaccgctgtctcagcctcgagcagtccacccagaccgtgcaggggcccgactccgccgcctgcggacttttctgttgcatgttcttgcatgccttcgtgcactggcccgaccgacccatggacggaaaccccaccatgaacttgctgacgggggtgcccaacggcatgctacaatcgccacaggtgctacccaccctccggcgcaaccaggaggagctctaccgcttcctcgcgcgccactccccttactttcgatcccaccgcgccgccatcgaacacgccaccgcttttgataaaatgaaacaactgcgtgtatctcaataa

SEQ ID NO: 1064 - DNA, 2817 bp, Adenovirus D20; identical to SEQ ID NO: 211
  MISC_FEATURE (1)..(2817): D20.orf00037 L3 hexon

SEQ ID NO: 1065 - DNA, 651 bp, Adenovirus D20
  MISC_FEATURE (1)..(651): D20.orf00038 L3 pVI
atgggcacctggaacgagatcggcaccagccagctgaacgggggcgccttcaattggagcagtgtctggagcgggcttaaaaatttcggctcgacgctccggacctatgggaacaaggcctggaatagtagcactgggcagttgttaagagaaaagctcaaagatcaaaacttccagcagaaggtggtggacgggctggcctctggcattaacggggtggtggacatcgcgaaccaggccgtgcagcgcgaaataaacagccgcctggacccgcggccgcccacggtggtggagatggaagatgcaactcctccgccgcccaagggcgagaagcggccgcggccagatgcggaggagacgatcctgcaggtggacgagccgccctcgtacgaggaggccgttaaggccggcatgccgaccacgcgcatcatcgcaccgctggccacgggtgtaatgaaacccgccacccttgatctgcctccaccacccacgcccgctccaccgaaggcagctccggttgtgcagccccctccggtggcgaccgccgtgcgccgcgtccccgcccgccgccaggcccagaactggcagagcacgctgcacagtatcgtgggcctgggagtgaaaagtctgaagcgccgccgatgctattga

SEQ ID NO: 1066 - DNA, 1002 bp, Adenovirus D20
  MISC_FEATURE (1)..(1002): D20.orf00040 L2 pV
atgtcaaagcgcaaaatcaaggaggagatgctccaggtcgtcgccccggagatttacggaccaccccaggcggaccagaaaccccgcaaaatcaagcgggttaaaaaaaaggatgaggtggacgagggggcagtagagtttgtgcgcgagttcgctccgcggcggcgcgtaaattggaaggggcgcagggtgcagcgcgtgttgcggcccggcacggcggtggtgttcacgcccggcgagcggtcctcggtcaggagcaagcgtagctatgacgaggtgtacggcgacgacgacatcctggaccaggcggcggagcgggcgggcgagtttgcctacgggaagcggtcgcgcgaagaggagctgatctcgctgccgctggacgaaagcaaccccacgccgagcctgaagcccgtgaccctgcagcaggtgctgccccaggcggtgctgctgccgagccgcggggtcaagcgcgagggcgaaaacatgtatccgaccatgcagatcatggtgcctaagcgcaggcgcgtggaggacgtgctggacaccgtgaaaatggatgtggagcccgaggtcaaggtgcgccccatcaagcaggtggcgccgggcctgggcgtgcagaccgtggacattcagatccccaccgacatggatgtcgacaaaaaaccctcgaccagcatcgaggtgcagaccgacccctggctcccagcctccaccgctaccgtctccacttctaccgccgccacggccaccgagcctcccaggaggcgaagatggggccccgccaaccggctgatgcccaactacgtgttgcatccttccatcatcccaacgccgggctaccgcggcacccggtactacgccagccgcagacgcccagccagcaaacgccgccgccgcaccacccgccgccgtctggcccccgcccgcgtgcgccgcgtaaccacgcgccggggccgctcgctcgttctgcccaccgtgcgctaccaccccagcatcctttaa

SEQ ID NO: 1067 - DNA, 591 bp, Adenovirus D20
  MISC_FEATURE (1)..(591): D20.orf00041 L2 pVII
atgtctattctcatctcgcccagcaataacaccggctggggtcttactaggcccagcaccatgtacggaggagccaagaagcgctcccagcagcaccccgtccgcgtccgcggccacttccgcgctccctggggagcttacaagcgcgggcggactgccaccgccgccgccgtgcgcaccaccgttgacgacgtcatcgactcggtggtcgccgacgcgcgcaactatacccccgccccctccaccgtggacgcggtcatcgacagcgtggtggccgacgcgcgcgactatgccagacgcaagagccggcggcgacggatcgccaggcgccaccggagtacgcccgccatgcgcgccgcccgggctctgctgcgccgcgccagacgcacgggccgccgggccatgatgcgagccgcgcgccgcgccgccactgcacccacccccgcaggcaggactcgcagacgagcggccgccgccgccgccgcggccatctctagcatgaccagacccaggcgcggaaacgtgtactgggtgcgcgactccgtcacgggcgtgcgcgtgcccgtgcgcacccgtcctcctcgtccctga

SEQ ID NO: 1068 - DNA, 1560 bp, Adenovirus D20; identical to SEQ ID NO: 181
  MISC_FEATURE (1)..(1560): D20.orf00042 L2 penton

SEQ ID NO: 1069 - DNA, 1608 bp, Adenovirus D20
  MISC_FEATURE (1)..(1608): D20.orf00044 L1 pIIIa
atgcaacgcatcatggccctgacgacccgcaaccccgagtcctttagacaacagccgcaggccaacagactttcggccattctggaggcggtggtcccctctcggaccaaccccacgcacgagaaggtgctggcgatcgtgaacgcgctggcggagaacaaggccattcgtcccgacgaggctgggctggtatacaacgccctgctggagcgcgtgggccgctacaacagcacgaacgtgcagtccaacctggaccggctggtgacggacgtgcgcgaggccgtggcgcagcgcgagcggttcaagaacgagggcctgggctcgctggtggcgctgaacgccttcctggcgacgcagccggcgaacgtgccgcgcgggcaggacgattataccaactttatcagcgcgctgcggctgatggtgaccgaggttccccagagcgaggtgtaccagtcgggcccggactactttttccagactagcagacagggcctgcagacggtgaacctgagccaggctttcaagaacctgcgcgggctgtggggcgtgcaggcgcccgtgggcgaccggtcgacggtgagcagcttgctgacgcccaactcgcggctgctgctgctgctgatcgcgcccttcaccgacagcggcagtgtgaaccgcaactcgtacctgggtcacctgctgacgctgtaccgcgaggccataggccaggcacaggtggacgagcagaccttccaggagatcactagtgtaagccgcgcgctggggcagaacgacaccgacagtctgagggccaccctgaacttcttgctgaccaatagacagcagaagatcccggcgcagtatgcgctgtcggccgaggaggagcgcatcctgagatatgtgcaacagagcgtagggctgttcctgatgcaggagggggccacccccagcgccgcgctggacatgaccgcgcgcaacatggaacctagcatgtacgccgccaaccggccgtttatcaataagctgatggactacctgcaccgcgcggcgtccatgaactcggactactttaccaatgccattttgaacccgcactggctcccgccaccggggttctacacgggcgagtacgacatgcccgaccccaacgacgggtttctgtgggacgatgtggacagcgcggtgttttccccgaccttgcaaaagcgccaggaggcggtgcgcacgcccgcgagcgagggcgcagtgggtcggagcccctttcctagcttagggagtttgcatagcttgccgggctcggtgaacagcggcagggtgagccggccgcgcttgctgggcgaggacgagtacctgaacgactcgctgctgcagccgccgcgggtcaagaacgccatggccaataacgggatagagagtctggtggacaaactgaaccgctggaagacctacgctcaggaccatagggagcctgcgcccgcgccgcggcgacagcgccacgaccggcagcggggcctggtgtgggacgacgaggactcggccgacgatagcagcgtgttggacttgggcgggagcggtggggccaacccgttcgcgcatctgcagcccagactggggcgacggatgttttga

SEQ ID NO: 1070 - DNA, 1125 bp, Adenovirus D20
  MISC_FEATURE (1)..(1125): D20.orf00046 L1 52 kDa protein
atgcatcccgtcctgcgccaaatgcgtcccacccccccggcgaccaccgcgaccgcggccgtagcaggcgccggcgctagccagccacagccacagacagagatggacttggaagagggcgaagggctggcgagactgggggcgccgtccccggagcgacacccccgagtgcagctgcaaaaggacgtgcgcccggcgtacgtgcctgcgcagaacctgttcagggaccgcagcggggaggagcccgaggagatgcgcgactgccgttttcgggcgggcagggagctgcgcgagggcctggactgccagcgcgtgctgcgcgacgaggatttcgagccgaacgagcagacggggatcagccccgcgcgcgctcacgtggcagcggccaacctggtgacggcctacgagcagacggtgaagcaggagcgcaacttccaaaagagtttcaacaaccatgtgcgcacgctgatcgcgcgcgaggaggtggccctgggcctgatgcacctgtgggacctggcggaggccatcgtgcagaacccggacagcaagcctctgacggcgcagctgttcctggtggtgcagcacagcagggacaacgaggcgttcagggaggcgctgctgaacatcgccgagcccgagggccgctggctgctggagctgattaacatcttgcagagcattgtagtgcaggagcgcagcctgagcttggccgagaaggtggcggctatcaactactcggtgctgagcctgggcaagttttacgcgcgcaagatttacaagacgccgtacgtgcccatagacaaggaggtgaagatagacagcttttacatgcgcatggcgctcaaggtgctgacgctgagcgacgacctgggcgtgtaccgcaacgaccgcattcacaaggccgtgagcacgagccggcggcgcgagctaagcgaccgcgagttgatgctgagcctgcgccgggcgctggtagggggcgcctccggcggcgaggagtcctacttcgacatgggggcggacctgcattggcagccgagccggcgcgccttggaggccgtctatggtccagaggacttggatgaggaagaggaagaggaggaggatgcacccgttgcggggtactga

SEQ ID NO: 1071 - DNA, 1854 bp, Adenovirus D20
  MISC_FEATURE (1)..(1854): D20.orf00048 pTP
atggactatttcctgccgctgcgcaacatatggaaccgcgtccgcgagttcccgcgcgcctccaccaccgccgccggcatcacctggatgtcccgctacgtctacggctaccaccgcctcatgctcgaggacctggccccgggcgcgccggccacccagcgctggccgctctaccgccagccgccgccgcactttctagtcggataccagtacctcgtgcgcacctgcaacgactacgtattcgactcgcgcgccttctcgcggctcaggtactcggaggtcgtgcagcccggcttgcagaccgttaactggtcgctcatggccaactgcacctacaccatcaacacaggggcctaccaccgcttcgtcgacatggacgacttccaggacaccctcacccgcgtgcaacaggccatcctcgccgagcgcgtcgtcgccgacctggcgctcgtgcagccgctcaggggcgtcggggtcacccgcatggaagactctgcctccgccagtgatgacattgaaaggctcatgcatgactactacaagaacctgagccggtgtcagggccaggcctggggcatggccgagcggctccgcatccagcaagcgggacccaaggacctggtcctcctcgccaccatccgccgcctcaaaaacgcctacttcaattacatcatcagcaaccgcaattctaacagcgtccacagggctgctacgtgtttgagcttaccttgcgactgcgattggctagacgctttcctcgaaagattctccgatccggtcgatctcgacgcgctcacgtcccctacaccgcaattgataagatgcatcgtcagcgccctctcgctgcccaacggggacccgccccattaccgggagatgaccggcggcgtcttcacgctgcgtcctcgcgaacggggtcgcgccgtaaccgaaaccatgcgtcgccgccgcggggagatgatcgagcgcttcgtcgaccgtctcccggtgcgtcgccgtcgtcgtcgcgccccgccaccaccaccgcccccagaggaagaaatagaagaagaggtcgtcatggaagaagaggaagaggaggagacccccggggatttcgagcgcgaggtgcgcgccaccatcgccgagctcatccggctcctggaagacgagctcacggtctcggcccgcaacgcccagtttttcaacttcgccgtggacttctacgaggccatggaaaggctggaggccatcggcgacatcagcgagatgcccctgcgccgctggatcatgtacttcttcgtcaccgagcacatcgccaccaccctcaactacctcttccaacgcctgcgcaactacgctgtcttcacgcggcacgtggagctcaacctcgcgcaggtggtcatgcgcgcgcgcaacgccgacggggacgtggtctacagccgcgtctggaacgagagcggcctgggcgccttctcgcagctcatgggtcgcatctccaacgacctcgccgccaccgtcgagcgcgcgggccgcggcgatctccaggaggaggagatcgaacagttcatgtccgagatcgcctaccaggacaactcgggcgacgtgcaagagatcctgcgtcaggccgccgtcaatgacgccgagattgattctgttgaactgtctttcaggttcaaagtcacggggccagtggtcttcacacagaggcggcagatccaggatgtcaaccgccgcgtcgtcgcgcacgccagcgctctcagggcgcagcaccgggacctgcccgagcgccacgccgaagtgcctctgccgcccctgcccgcggggccggaaccgccgctgccgccgggagcgcgtccgcgacaccgcttctaa

SEQ ID NO: 1072 - DNA, 3276 bp, Adenovirus D20
  MISC_FEATURE (1)..(3276): D20.orf00051 E2B DNA polymerase
atgcaatgcgtggacacggccaccaactcacccgtagaaatcaagtaccatctgcatctcaagcacgccctcacccgcctctacgaggtcaacctcagaaccctgccccctgacctggatctccgcgacaccatggacagctcccaactgcgcgcccttgtcttcgctctccgcccccgccgcgccgagatctggacctggctcccgcgcgggctcgtcagcctctccgtcctcgaggagccccagggtgagtcccacgcaggcgaacatgaaaaccaccagccagggccgccactcctgaagttcctcctcaagggacgcgctgtgtatctcgtggatgaggtacagcccgtgcagcgctgcgagtactgcggacgcttttacaagcatcagcatgagtgctcggttcgccggcgggatttctactttcatcacatcaacagccactcgtccaactggtggcaggaaatccagttcttcccaatcggctctcatcctcgcacggagcggctctttgtcacctacgatgtagaaacctacacctggatggggtccttcggcaagcagctcgtccccttcatgctggtcatgaaattctcgggggaccccgagctggtcgccctcgctcgcgatctcgccgtgcgcttacgctgggatcgctgggagcgtgaccccctcaccttctactgcgtcaccccagaaaagatggccgtgggccagcagttccgcctctttcgcgacgagctccagaccctcatggcccgcgagctctgggcttccttcatgcaagccaacccacatctccaggagtgggcgctcgagcagcacggcctgcaatgccccgaggacctcacctacgaggaactcaaaaagctgccgcacatcaaaggccgcccgcgattcatggaactctacatcgtcgggcacaacatcaacggcttcgacgagatcgtcctcgccgcccaggtcatcaacaaccgagcctccgtcccgggccctttccgcatcacccgcaatttcatgccgcgggcaggcaaaattctcttcaatgacgtcactttcgctctgcctaaccccctctcgaagaagcgcaccgatttcgagctctgggagcacggcggctgcgacgactcggacttcaagtaccagttcttgaaagtcatggtcagagacaccttcgccctgacgcacacctcgctccgcaaggccgctcaagcttacgccctccccgtggagaagggctgctgtccctacaaggccgtgaaccatttctacatgctgggctcttaccgtgcggacgatcgaggattcccgctccgggagtactggaaggatgacgaggagtacgccctcaaccgcgagctatgggagaagaaaggagaggcgggttatgacatcatccgcgaaacactggactactgcgccatggacgtcctcgtcaccgccgagctcgtcgccaagctgcaagactcctacgcgcacttcatccgcgactcggtccgcctgccccacgcccactttaacatcttccaacggcccaccatctcctcaaactcgcatgccatctttcgccagatcgtcttccgcgccgagcagccccagcgcaccaatctcggccccgccttcttggccccctcgcacgagttgtatgactacgtgcgcgccagcatccgcggggggcgctgttatcccacctacatcggcatcctctcggagcccatctatgtctacgacatctgcggcatgtacgcctccgccctcacacatcccatgccttggggtccgcccctcaacccctacgagcgagcgctggccgcccgcgagtggcagatggccttggatgatgcatccttaaaaatcgattattttgacaaggaactctgtccgggcatcttcaccatcgatgcggacccccccgacgagcacctcctggatgtgctgcccccgttttgctcgcgcaagggcggcagactctgctggaccaacgagcccctgcgcggcgaggtggccaccagcgtggacctggtcaccctgcataaccgcggctggcgcgtcaggatcgtgcccgacgagcgcaccaccgtcttccccgaatggaagtgcgtcgcgcgcgagtatgtccagctcaacatcgcggccaaggagcgcgccgaccatgacaaaaatcagaccatgagatccatcgccaagcttctctccaacgccctctatggctcctttgccaccaagcttgacaataaaaaaattgtcttttctgaccagatggatgaaagtttactcaaaagcatcgcggcagggcaggccaacatcaaatcctcctcgtttctagaaactgacaacctgagtgccgaggtcatgcccgttctcgagagggaatacctaccccaacagctggcgctcgtggacagcgacgcggaagagagtgaggacgagcacagacccgcccccttttatacccccccgtcggggaccccaggtcacgtggcctacacctacaagccaatcaccttcttggatgcggaggagggggacatgtgtctgcataccgtggaaaaggtggaccccctggtggacaacgaccgctacccctcgcacgtggcctcctttgtcttggcgtggacgcgcgcctttgtctcagagtggtccgagtttctctacgaggaggaccgcgggacgcccctgcaggacaggcccatcaagtccgtctacggggacacagacagcctgtttgtcaccgaacgcggacacagactcatggagacgcgaggtaagaagcgcatcaaaaagaacgggggaaaactggtttttgaccccgatcaccccgagctcacctggctcgtcgagtgcgagaccgtctgcgcccactgcggagcggacgccttcgcccccgagtccgtctttctagcgcccaagctctacgccctgcaatccctcctctgtcccgcctgcgggcgctcttccaaaggaaagctccgcgccaagggccatgccgccgaggcccttaactacgagctcatggtcaactgctatctcgccgacgcgcagggcgaagaccgtgcccgtttcagcaccagcaggatgagtctcaagcgcacccttgcaagcgcccagcccggggcccaccccttcaccgtgacggagaccaccctcactcggaccctgagaccctggaaggacatgacgctggccgcgctggacgcccatcgtctcgtgccctacagtcgcagtcgtcccaacccccgaaacgaggaagtctgctggatcgagatgccgtag

SEQ ID NO: 1073 - DNA, 1047 bp, Adenovirus D20
  MISC_FEATURE (1)..(1047): D20.orf00052 pIVa2 IVa2
atgcccatggccgacgggctcaagcccctgaaaaactttgcttcactgcaagagctgctttcgctgggcggggaccgcctcctcggcgagctcgtccgggaaaacctccaagtcagggacatgctcaacgaggtggcccccctcctccgggacgacggcagctgcatctccttgaactaccacctgcaaccagtcatcggggtcatctacggtccgaccgggtgcggcaagtcccagctgctgagaaacctcctctcctcgcagctcatcacccccgccccggaaaccgtctttttcatcgccccgcaggtggacatgattcccccctccgagatgaaagcctgggagatgcagatctgcgaggggaacttcgccccgggccccgagggaaccatagtcccccaatctggcaccctccgccccaaattcattaaaatgtcttatgatgatctcacccaggagcataattatgatgtctctgaccccagaaacgtctttgccaaagccgcagcccacgggcccattgccatcatcatggatgagtgcatggaaaacctgggcgggcacaagggcgtctccaaattcttccacgcattcccttccaagttgcatgacaagttccccaagtgcacaggctacaccgtcctggtggtcctgcacaacatgaacccccggcgggatctgggcggcaacatcgccaacctcaagatccaggccaaactgcacatcatctccccccgcatgcatccctcccagctcaaccgttttgccaacacctacaccaaggggctccccgtggccatcagtctcctcctcaaggacatcatccagcaccacgcccagcgcccctgctatgactggatcatctacaacacgaccccagagcacgaggccatgcagtggtgctacctccacccccgggacgggctcatgcccatgtacctcaacatccaatcccacctctatcgggtcctggaaaaaatccaccgcactctcaatgatcgggagaggtggaccagggcctaccgcgcgcgaaaaaataaataa

SEQ ID NO: 1074 - DNA, 402 bp, Adenovirus D20
  MISC_FEATURE (1)..(402): D20.orf00056 IX pIX
atgaacgggaccggcggggccttcgaaggggggctttttagcccttatttgacaacccgcctgccgggatgggccggagttcgtcagaatgtgatgggatctacggtggatgggcgcccagtgcttccagcaaattcctcgaccatgacctacgcgaccgtggggaactcgtcgctcgacagcaccgccgcagccgcggcagccgcagccgccatgacagcgacgagactagcctcgagctacatgcccagcagcggtagcagcccctctgtgcccagttccatcatcgccgaggagaaactgctggccctgctggccgagctggaagccctgagccgccagctggccgccctgacccagcaggtgtccgagctccgcgagcagcagcagcaaaataaatga

SEQ ID NO: 1075 - DNA, 1488 bp, Adenovirus D20
  MISC_FEATURE (1)..(1488): D20.orf00058 E1B 55 kDa protein
atggagccagaacacccaactgagcaggggctacattctggacttcgcagccatgcacctgtggagggcatgggtgaggcagcggggacagagaatcttgaactactggcttatacagccagcagctccgggtcttcttcgtctacacagacaaacatccatgttggaggaagaaatgaggcaggccatggacgagaacccgaggagcggcctggaccctccgtcggaagaggagctggattgaatcaggtatccagcttgtacccagagcttagcaaggtgctgacatccatggccaggggagtgaagagggagaggagcgatgggggcaataccgggatgatgaccgagctgacggccagcctgatgaatcgcaagcgcccagagcgcattacatggcacgagctacagatggagtgcagggatgagttgggcctgatgcaggataaatatggcctggagcagataaaaacacattggttgaacccagatgaggattgggaggaggccattaagaaatatgccaagatagccctgcgcccagattgcaagtacatagtgaccaagaccgtgaatattagacatgcctgctacatttcgggtaacggggcagaggtggtcatcgataccctggacaaggccgccttcaggtgttgcatgatgggaatgagagcaggagtgatgaatatgaattccatgatcttcatgaacatgaagttcaatggagagaagtttaatggggtgctgttcatggccaacagccacatgaccctgcatggctgcagtttctttggcttcaacaatatgtgcgccgaggtctggggcgcttccaagatcaggggatgtaagttttatggctgttggatgggcgtagtgggaagacccaagagcgagatgtctgtgaagcagtgtgtgtttgagaaatgctacctgggagtctctaccgagggcaatgctagagtgagacactgctcttccctggatacgggctgtttctgcctggtgaagggtacggcctctctgaagcataatatggtgaagggctgcacagatgagcgcatgtacaacatgctgacctgcgactcgggggtctgccatatcctgaagaacatccatgtgacctcccaccccagaaagaagtggccagtgtttgagaataacctgctgatcaagtgccatatgcacctgggtgccagaaggggcaccttccagccgtaccagtgcaactttagccagaccaagctgctgttggagaacgatgccttctccagggtgaacctgaacggcatctttgacatggatgtctcggtgtacaagatcctgagatacgatgagaccaggtccagggtgcgcgcttgcgagtgcgggggcagacacaccaggatgcagcctgtggccctggatgtgacagaggagctgagaccagaccacctggtgatggcctgtaccgggaccgagttcagctccagcggggaggacacagattag

SEQ ID NO: 1076 - DNA, 225 bp, Adenovirus D20
  MISC_FEATURE (1)..(225): D20.orf00062 E1A 14.8 kDa protein
atgtcatgtaacaagtcctcaattttttcaacagctgctcgcctctcgccactgggtctgactggggtgggtctgtgcacttgcaggggcgtttcgcctgacagctcagggggacacgggtggtcttcttctgagggtgatgactcatcctctgacaccggacctagaaacaaaaataaaccacacttagcacagctgtttaagcatcacccagttatgtgttaa

SEQ ID NO: 1077 - DNA, 579 bp, Adenovirus D20
  MISC_FEATURE (1)..(579): D20.orf00063 E1A 28 kDa protein
atgagacacctgcgcctcctgtcttcaactgtgcctattgacatggccgcattattgctggaggattatgtgagtacaatattggaggacgaactgcatccatctccattcgagctgggacctacacttcaggacctatatgatttggaggtagatgcccatgatgacgacccgaacgaagaggctgtgaatttaatatttccagaatctctgattcttcaggctgacatagccagcgaagctgtacctacaccacttcatacaccgactctgtcacccatacctgaattggaagaggaggacgagctagacctccgatgttatgaggaaggttttcctcccagcgattcagaggacgaacagggtgagcagagcatgactctaatctcagaatatgcttgtgtggttgtggaagagcattttgtgttggacaatcctgaggtgcccgggcaaggctgtagatcctgccagtaccaccgggataagaccggagacacgaacgcctcctgcgctctgtgttacatgaaaaagaacttcagctttatttacagtaagtggagtaaatgtgagagagactga

SEQ ID NO: 1078 - DNA, 177 bp, Artificial Sequence
  D24.orf00004 hypothetical protein
atgttaacttttgtttactttgtggggtatattattgatgatgtttttctcagactctgggagcggagctcagagaaatctctactcgctggcactcaagagtggcctcttgacgggctcgactggtttaaataccctgtggatcagctgatctgtgacataaacaccggactttga

SEQ ID NO: 1079 - DNA, 378 bp, Adenovirus D24
  MISC_FEATURE (1)..(378): D24.orf00006 E4 ORF1 protein
atggctgaatctctgtatgctttcatagatagtcctggagggattgctcccgtccaggaagggactagcaatagatataattttttttgccctgaatctttccacattcctccgcatggggtggtattgcttcacctaaaagtgagtgtgctggttcctactggatatcagggcagatttatggccttgaatgactaccatgccagggacatactaacccagtccgatgtgatttttgccggaagaagacaggaacttactgtgctgctttttaatcacacggaccgatttttgtatgtccgcaagggccacccagtgggtaccctgttgttggagagagtgatttttccttcagtgaaaatagccaccttagtttag

SEQ ID NO: 1080 - DNA, 393 bp, Adenovirus D24
  MISC_FEATURE (1)..(393): D24.orf00007 E4 ORF2 protein
atgcttcagcgacgcggtgtaagctaccacattgtggtccctggggtcctagtgacttatttacaggacttttctattacgcaaatgattaaagaaaaactaccacgctttatcactcacattttggaaggcatcaccggagacacaaagagagcttattccagcatgcagtttttgggtgctagctttggagcattaaagttttcccttacgcttgccagtcccacgcttagccctggctctgaattgtcagctgtagtggcccaggacttaagtgattttttgcagctgacattgaggcgcgagctcagggcggagggcagaaccttattgaatcttgttgttttgaacacgctgcaggtggtggagcagcaggatctgtttctattatga

SEQ ID NO: 1081 - DNA, 354 bp, Adenovirus D24
  MISC_FEATURE (1)..(354): D24.orf00009 E4 13.6 K E4 ORF 3 13.6 kDa protein
atgaaggtctgcctgattatgaaagtggagggggcactgtgggagcttttccacatgtgcggagtggacttacaccaacaatttgtagagataatccaaggctggaaaaatgagaattacctggggatggtgcaggaatgtaacctgatgattgatgaaatcgatggagggccagcctttaatgtgattcttatgctggatgtacgcgtagagccactgctcgaagccacggtcgagcaccttgaaaatagagtgggttttgacctggctgtctgtttccaccagcacagcggaggggaacgctgtcacctgcgtgacttgcactttatcgtccttcgagaccgtttggaataa

SEQ ID NO: 1082 - DNA, 879 bp, Adenovirus D24
  MISC_FEATURE (1)..(879): D24.orf00014 E4 34 kDa protein
atgcaaaccgagattcaatccagctcgctccgccatcatccatatcgcagggcccgtttaccacgatctgatgaggaaaccagggcttcactgactgaacaacatcccctgttgcctgattgtgatcatgcagattatcataatgtaagttctgtccgtggattaccatgtgctgctggctttaccctgctccaagagtttccagtcccctgggatatgatcttgactccagaggaaataaaaattttaaaaagatgtatgtcagtgtgcctgtgccccgctaccctggacttggtgagagctcagatggtgagcgggtacgagcgctggatcctgcattgccactgttcatccccgggctccctgcagtgtcgggcgggaggcaccctgctggccgtgtggttcaggagagtcatttacgggtgcatgttcaaccagcgctttccctggtaccgtcagattgtgaacagagacatgcccaaagagatcatgtatatgggcagtgtgttcatgaggggcaggcatctgatatactgccgcatctggtacgatggtcacgtgggttccatcatccccaacatgagttttggctggagcaccctgaattatgggctgctgaataacatggtgattatgtgctgcacttactgtgagaacatgagcgagatcaggatgcggtgctgtgcccgacgcaccaggagactgatgctgaaggctgtggggatcatagtcagagagacttgtgatcccgatcccatctgcagcagccgcaccgagccccggcggcagagactgttgagggcgctgatggagaggcacagacccatcctgttttccgagtatgaatctgtgcgttcttctcgtttcaccagactgtga

SEQ ID NO: 1083 - DNA, 246 bp, Adenovirus D24
  MISC_FEATURE (1)..(246): D24.orf00016 E4 ORF6/7 protein
gtgaccttggactgtgaggcccgcttggatgacttttcagaggacggcttcatctcaatcaccgacccccgtttggctcgccaggaaactgtgtggattatagaccccaagtccagttcccgcactaatcagaacatttccctatttaaggccacccgtgctgagagaatcgtttacactgtgaaatgggctggtggtgggagactgactacccgtgctggtgtaaaaatcaataaagatacatga

SEQ ID NO: 1084 - DNA, 1146 bp, Adenovirus D24; identical to SEQ ID NO: 152
  MISC_FEATURE (1)..(1146): D24.orf00017 L5 fiber

SEQ ID NO: 1085 - DNA, 150 bp, Adenovirus D24
  MISC_FEATURE (1)..(150): D24.orf00018 U protein
atgaaaattgtggaccaggaatttgacatccctttcaaggtgtggaggaagttcgccgcccgccggggactggagtaccagagctgggaggagggttccgaggtgctgctgaacaactacaccagagacatactttcagatttcaagtaa

SEQ ID NO: 1086 - DNA, 390 bp, Adenovirus D24
  MISC_FEATURE (1)..(390): D24.orf00020 E3 14.6 kDa protein
atgactgaccacctggacctcgagatggacggccaggcctccgagcagcgcatcctgcaactgcgcgtccgacagcagcaggagcgggccgccaaggagctcctcgatgccatcaacatccaccagtgcaagaagggcatcttctgcctggtcaagcaggcaaagatcacctacgagctcgtgtccggcggcaagcagcatcgcctcgcctatgagctaccccagcagaagcaaaagttcacctgcatggtgggcgtcaaccccatagtcatcacccagcagtcgggcgagaccaacggctgcatccactgctcctgcgaaagccccgagtgcatctactccctcctcaagaccctttgcggactccgcgacctcctccccatgaactga

SEQ ID NO: 1087 - DNA, 393 bp, Adenovirus D24
  MISC_FEATURE (1)..(393): D24.orf00022 E3 RID-beta
atgcagcctctgctcatgctgatatccctcctatcccctgcccttgccacttctgctgattactctaaatgcaaattcgcggacatatggaatttcttagattgctatcaggagaaaattgatatgccctcctattacttggtgattgttggggtagtcatggtctgctcatgcactttctttgccattatgatctacccctgttttaatcttggctggaactctgttgaggcattcacatacacactagaaaacagttcactagcctccacgccaccacccacaccgcctccccgcagaaatcagttccctatgattcagtacttagaagagccccctccccggcccccttccactgttagctactttcacataaccggcggcgatgactga

SEQ ID NO: 1088 - DNA, 276 bp, Adenovirus D24
  MISC_FEATURE (1)..(276): D24.orf00023 E3 10.4 K E3 ORF 4 10.4 kDa protein
atgattcctaggttcttcctatttaacatcctgttctgtctcttcaacatctgtgctgccttcgcggccgtctcgcacgcctcgcccgactgtctagggcctttcccaacatacctcctctttgccctgctaacctgcacctgcgtctgcagcattgtctgcgtggtcatcacctttctgcagctcatcgactggtgctgcgcgcgctacaattatctccaccacagtcccgaatacagggacgagaacgtagccagaatcttaaggctcatctga

SEQ ID NO: 1089 - DNA, 846 bp, Adenovirus D24
  MISC_FEATURE (1)..(846): D24.orf00025 E3 CR1-gamma
atgaaggctttcacagcttgcgttctgtttaacataatcacacttagtgtagctgcaaatggttttaaacatgttaatgttaccagattaagtaatgtaacactgacaggagctggaattaatactacatggacagggtattttaatgagggtccaaaaggaaaaaatgggtggatgaatatttgcacatggggcgatcctagatatgtgtgccatggaaatagcagtactattactaatcttacagttgtggcacttctaaatttaaccactaacagaagatttaaagcagaaagttttactagtaacgatggttatgaaactaccagtgcaaaattttatgaaattaaaattattgagcttccaacaactagagcacccaccacagttaggacaacacagcctaccactgtgcccactacacatccaaccaccacagtcagtacaactattgagaccactactcatactacacagctagacacaacagtgcagaatactactttattgattgggtttttactgagaggaaatgaaagtactactgaacagacagaggctacctcaagtgccttcagcagcactgcaaatttaacttcgcttgcttggactaatgaaaccggagtatcattgatgaatcgacagccttactcaggtttggatattcaaattacttttctggttgtctgtgggatctttattcttgcggttcttctgtactttgtctgctgcaaagccagagagaaatctaggcggcccatatacaggccagtaatcggggaacctcagcctctccaagtggatggaggcttaaggaatcttctcttctcttttacagtatggtga

SEQ ID NO: 1090 - DNA, 1272 bp, Adenovirus D24
  MISC_FEATURE (1)..(1272): D24.orf00026 E3 CR1-beta
atgaatacagtgttccgtatcgtgctgctctctcttcttgtagctttcggtcaggcaggaattcatattattaatgctacatggtgggataatataactttagtgggaccctcagatactccagttacctggtatgatggcaagggattgcaattttgtgacggaagtacagttaagaatccgcagatcagacatacttgtaatgatcaaaacttaactctgattcatgttaacaaaacccatgaaagaacatacatgggttacagacatgacagtaagggaaaagtagactataaggttacagtcattccacctcctcctgctactgtaaagccacaaccagatccagaaaatgtctttgtttatatgggaaataatgtaactttagttggacctccaggaattccagttagttggtattatcataatggcacacagttctgcgatggagataaaattattcatccagaattcaaccacacctgtgataaacaaaaccttacactgctgtttgtaaactttacacatgatggaggctatcttggattcaattacaaaggtactcagagaattcagtatgaggttatagttttagatcgatttccaaattctggtcagatgaaaattgaagaacaaagtgaggaaacagaacagaaacatactgagcataataaggctggacaaaagcagggtatagatacaaatcaaaagaaagctaataacagacaaaagccatctcaaaggccatcaagaagacggccgacaaacactcctgagacaaaacaacttacagtgtctattgggtctaacttaactttagttggtccagatggaaaagtcacttggtatgatggtgatttaaaaagaccatgtgaagaacaaaactataggcttccacatcagtgtagtgctcagaacttaactttaattaatgtaactaaatctcatgagggaacttactatggcactaatgacaaagacgaaagcaaaagatacagagtgaaagtgaacactacaaattctcaagctgtaaaaattaacccatataccagacctactactcctgatcagaaacacagatttgaattacaaattgaaaataatgcaaatgatgaagaatcaaaaattccatctactactgtggcaatcgtggtgggagtgattgcgggcttcataactataatcattgtcattctgtgctacatctgctgccgcaagcgtcccagggcatacaatcatatggtagacccactactcagcttctcttactga

SEQ ID NO: 1091 - DNA, 471 bp, Adenovirus D24
  MISC_FEATURE (1)..(471): D24.orf00029 E3 gp 17.6 kDa protein
atgaaggggctcttgctgattatcctttccctggtggggggtgtgctgtcatgccacgaacagccacgatgtaacattaccacaggcaatgagaggaacgactgctctgtagttatcaaatgcgagcaccattgtcctctcaacatcacattcaagaataagaccatgggaaatgtatgggtgggattctggcaaccaggagatgagcagaactacacggtcactgtccatggtagcgatggcaatcacactttcggtttcaaattcatttttgaagtcatgtgtgatatcacactacatgtggctagacttcatggcttgtggccccctaccaaggagaacatggtgggtttttctttggcttttgtgatcatggcctgcttgatgtcaggtctgctggtaggggctctagtgtggtttctgaaacgcaagcccaggtacggaaatgaggagaaggaaaaattgctataa

SEQ ID NO: 1092 - DNA, 570 bp, Adenovirus D24
  MISC_FEATURE (1)..(570): D24.orf00030 E3 CR1-alpha
gtgagtttaataaaagctgaactaagaaccttctttggaatcccttgtcatcatcaaatcaacaagaccatcaacttcacctttgaggaacaggtgaactttacctgcaagccacacaagaagtacatcatctggttttatcacaacactactctagcagtagccaacacctgctcgaacgacggtgttctcctacctaacaatctcaccagtggactaaccttctcagttaaaagggcaaagctaattcttcatcgccctattgtagaaggaacttaccagtgtcagagcggaccttgcttccacagtttcactttggtgaacgttaccggcagcagcacagccgctccagaaacatctaaccttctttctgatactaacaaacctcgtgtcggaggtgagctttgggttccatctctaacagagggtgggagttctattgaagtggttgggtatttgattttaggggtggtcattggtgggtgcatagcagtgctgtatcaacttccttgctgggtcgaaatcagggtatttatctgctgggtcagacattgtggggaggaaccatga

SEQ ID NO: 1093 - DNA, 321 bp, Adenovirus D24
  MISC_FEATURE (1)..(321): D24.orf00031 E3 12.2 K E3 12.2 kDa protein
atgtcccatggtgactcggctgagctcgctcggttgaggcatctggaccactgccgccgcctgcgctgcttcgcccgggagagctgcggactcatctactttgagtttcccgaggagcaccccaacggccctgcacacggagtgcggatcaccgtagagggcaccaccgagtctcacctggtcaggttcttcacccagcaacccttcctggtcgagcgggaccggggagctaccacctacaccgtctactgcatctgtcctaccccgaagttgcatgagaatttttgctgtactctttgtggtgagtttaataaaagctga

SEQ ID NO: 1094 - DNA, 684 bp, Adenovirus D24
  MISC_FEATURE (1)..(684): D24.orf00032 L4 pVIII
atgagcaaggagattcccaccccttacatgtggagctatcagccccagatgggcctggccgcgggcgcctcccaggactactccacccgcatgaactggctcagtgccggcccctcgatgatctcacgggtcaacggggtccgtaaccatcgaaaccagatattgttggagcaggcggcggtcacctccacgcccagggcaaagctcaacccgcgtaattggccctccaccctggtgtatcaggaaatccccgggccgactaccgtactacttccgcgtgacgcactggccgaagtccgcatgactaactcaggtgtccagctggccggcggcgcttcccggtgcccgctccgcccacaatcgggtataaaaaccctggtgatccgaggcagaggcacacagctcaacgacgagttggtgagctcttcgatcggtctgcgaccggacggagtgttccaactagccggagccgggagatcgtccttcactcccaaccaggcctacctgaccttgcagagcagctcttcggagcctcgctccggaggcatcggaaccctccagttcgtggaggagtttgtgccctcggtctacttcaaccccttctcgggatcgccaggcctctacccggacgagtttataccgaacttcgacgcagtgagagaagcggtggacggctacgactga

SEQ ID NO: 1095 - DNA, 186 bp, Adenovirus D24
  MISC_FEATURE (1)..(186): D24.orf00034 L4 22 kDa protein
gtgaagggtgacggtaagcacgagcggcagggctaccgatcatggagggtccacaaagccgcgatcatcgcctgcttgcaagactgcggggggaacatcgctttcgcccgccgctacctgctcttccaccgcggggtgaacatcccccgcaacgtgttgcattactaccgtcaccttcacagctaa

SEQ ID NO: 1096 - DNA, 2199 bp, Adenovirus D24
  MISC_FEATURE (1)..(2199): D24.orf00035 L4 100 kDa protein
atggaggagcagccgcgtaagcaggagcaggaggaggacttaaccacccacgagcaacccaaaatcgagcaggacctgggcttcgaagagccggctcgtctagaacccccacaggatgaacaggagcacgagcaagacgcaggccaggaggagaccgacgctgggctccagcatggctacctgggaggagaggaggatgtgctgctaaaacacttgcagcgccaatccatcatcctccgggacgccctggccgaccggagcgaaacccctctcagcgtcgaggagctgtgtcgggcctacgagctcaacctcttctcgccgcgcgtgccccccaaacgccagcccaacggcacctgcgagcccaacccgcgtctcaacttctatcccgtctttgcggtccccgaggccctagccacctatcacatctttttcaagaaccaaaagatccccgtctcctgccgcgccaaccgcacccgcgccgacgcgctcctcgctctggggcccggcgcgcgcatacctgatatcgcttccctggaagaggtgcccaagatcttcgaagggctcggtcgggacgagacgcgcgcggcaaacgctctgaaagaaacagcagaggaagagggtcacactagcgccctggtagagttggaaggcgacaacgccaggctggccgtgctcaagcgcagcgtcgagctcacccacttcgcctaccccgccgtcaacctcccgcccaaggtcatgcgtcgcatcatggatcagctcatcatgccccacatcgaggccctcgatgaaagtcaggagcagcgccccgaggacgcccggcccgtggtcagcgacgagcagctcgcgcgttggctcgggacccgcgacccccaggctttggaacagcggcgcaagctcatgctggccgtggtcctggtcaccctcgagctcgaatgcatgcgccgcttcttcagcgaccccgagaccctgcgtaaggtcgaggagaccctgcactacactttcaggcacggtttcgtcaggcaggcctgcaagatctccaacgtggagctgaccaacctggtctcatgcctggggatcctgcacgagaaccgcctgggacagaccgtgctccactctactctgaagggcgaggcgcgtcgggactatgtccgcgactgtgtatttctctttatctgccacacctggcaagcagccatgggcgtgtggcagcagtgtctcgaggacgaaaatctgaaggagctggacaagcttcttgctagaaaccttaaaaagctgtggacgggcttcgacgagcgcaccgtcgcctcggacctggccgagatcgtttttccagaacgcctgaggcagacgctgaaaggcgggctgcccgacttcatgagccagagcatgttgcaaaactaccgcactttcattctcgagcgatctgggatgctacccgccacctgcaacgcattcccctccgactttgtcccgctgagctaccgcgagtgtcccccgccgctgtggagccactgctatctcttgcagctggccaactacatcgcctaccactcggacgtgatcgaggacgtgagcggcgaggggcttctcgagtgccactgccgctgcaacctgtgctccccgcaccgctccctggtctgcaacccccagcttctgagcgagacccaggtcatcggtaccttcgagctgcaaggtccgcaggagtccaccgctccgctgaaactcacgccggggttgtggacttccgcgtacctgcgcaaatttgtacccgaggactaccacgcccatgaaataaagttcttcgaggaccaatcgcgcccacagcacgcggatctcacggcctgcgtcatcacccagggcgcgatcctcgcccaattgcacgccatccaaaaatcccgccaagagtttcttctaaaaaagggtagaggggtctacctggacccccagacgggcgaggtgctcaacccgggtctcccccagcatgccgaggaagaagcaggagccgctagtggagcagatggaagaagaatgggacagccaggcagaggaggacgaatgggaggaggagacagaggaggaagaattggaagaggtggaagaggagcaggaaacagagcagcccgtcgccgcaccatccgcgccggcagccccgccggtcacggatacaacctccacagctccggccaagcctcctcgtag

SEQ ID NO: 1097 - DNA, 1473 bp, Adenovirus D24
  MISC_FEATURE (1)..(1473): D24.orf00037 E2A DNA-binding protein
atggccggcggcagtcaggacgtgcgccggttcatggagcgagaggccactccgccccggggccacgggtcggcgcgctatccgccggagcaggagaggagcccctcgccgccaccacctcctctgcccaccaagcgccgaaagtatcagcgggtgggctccgggtcttccgaggaggacgtggtccccgtggacagccctccaaaaaagaagcaagccagaaagaccaagcatgtgaccaaggtagaccccgacgaagagatgccccaggaagatgccgtaatcgtgggagtgggattcagccagcctccggttctgttgaaggaaggcaaggacggaaaacgcatcgtcgagcctgcgacccccggtgtcctgaacgtgcgcaaccccctgagtctgcctctggtctcgtcctgggagaagggcatggataccatgaacgtgctgatggaacgctaccgcgtcgacagcggcctgcgcgatgcttacaagctcatgcccgagcagaccgagatcttccaaaagatgtgccagacctggatgaacgaggaggcccgcggtctgcaactgaccttcaccacccagaaagcatttagcaccgtcatgggtcgcctgttgcaaggttacatcttcagccacagcgggatcgcgcataagaactgggagtgcaccggctgcgccctgtgggatcatggctgctgcgatgtcgagggtcagctcaagtgtctgcatgggacggtgatgatccacaaggaccacgtggtggagatggatgtgaccagcgagaacgggcagcgcgcgttgaaggagcagcccagcaaggccaaggtgacccagaaccgctggggacgtagcgtggtgcaactgaccagccatgacgcgcgctgctgcgtgcatgatgccgggtgcgggaataaccagtttagcgggaagagctgcggcctgtttttcagcgagggggctaaggcccagcaagctttcaagcagatcacggccttcgtcaaggccctctacccgaatatgcagcgcggcgcggggatgatgctgatgcccgtgcactgcgagtgtaaccacaagcctcagagcgtgcccttcctgggccgccagctgtgcaagatgaccccgttcggcctgagcaacgccgaggacctggacaaggatcagatcagcgacaagagcgtgcttgccagtgtgaagtaccccagtctaatggtgttccagtgctgcaaccccgtgtaccgcaactcgcgcgcgcagagcaccggccccaattgtgatttcaagatctccggcccggacatgctgggcgccctgcagatgagccggcgcatgtggagcgagaccttccccgagaccccagtgcccaaactggtgatccccgagttcaagtggcttcccaagtaccagtaccgcaacgtggccctccccagcgcggcgcacaacgacgagcgcgagaaccccttcgacttttaa

SEQ ID NO: 1098 - DNA, 630 bp, Adenovirus D24
  MISC_FEATURE (1)..(630): D24.orf00038 L3 protease
atgagcggctccagcgaacaagagctcgcggccatcgtgcgcgacctgggatgcgggccctactttttgggaacccacgacaagcgcttccctggcttccttgccggcgacaagctggcctgcgccatcgtcaacacggccggccgcgagaccggaggcgtgcactggctcgcctttggctggaatccgcgctcgcgcacctgctacatgttcgacccctttgggttctcggaccgccggctcaagcagatttacagcttcgagtacgaggccatgctgcgccgaagcgcgcttgcctcctcgcccgaccgctgtctcagcctcgagcagtccacccagaccgtgcaggggcccgactccgccgcctgcggacttttttgttgcatgtttttgcatgccttcgtgcactggcccgaccgacccatggacggaaaccccaccatgaacttgctgacgggggtgccaaacggcatgctacaatcgccacaggtgctgcccaccctcaggcgcaaccaggaggagctctaccgcttcctcgcgcgccactccccttactttcgatcccaccgcgccgccatcgaaaacgccaccgcttttgataaaatgaaacaactgcgtgtatctcaataa

SEQ ID NO: 1099 - DNA, 2775 bp, Adenovirus D24; identical to SEQ ID NO: 212
  MISC_FEATURE (1)..(2775): D24.orf00042 L3 hexon

SEQ ID NO: 1100 - DNA, 651 bp, Adenovirus D24
  MISC_FEATURE (1)..(651): D24.orf00043 L3 pVI
atgggcacctggaacgagatcggcaccagccagctgaacgggggcgccttcaattggagcagtgtctggagcgggcttaaaaatttcggctcgacgctccggacctatgggaacaaggcctggaatagtagcacggggcagttgttaagggaaaagctcaaagaccagaacttccagcagaaggtggtggacggcctagcctcgggcattaacggggtggtggacatagcaaaccaggccgtgcagcgcgagataaacagccgcctggacccgcggccgcccacggtggtggagatggaagatgcaactcctccgccgcccaagggcgagaagcggccgcggcccgacgcggaggagacgatcctgcaggtggacgagccgccctcgtacgaggaggccgtcaaggccggcatgcccaccacgcgtatcatcgcgccactggccactggtgtaatgaaacccgccacccttgacctgcctccgccacccacgcccgctccaccgaaggcagctccggttgtgcagccccctcctgtggcgaccgccgtgcgccgcgtccccgcccgccgccaggcccagaactggcagagcacgctgcacagtatcgtgggcctgggagtgaaaagtctgaagcgccgccgatgctattga

SEQ ID NO: 1101 - DNA, 117 bp, Adenovirus D24
  MISC_FEATURE (1)..(117): D24.orf00044 L2 pX core protein L2 pX
atgcgcaggcgcctgagtggcggctttctgcccgcgctcatccccataatcgcggcggccatcggcacgatcccgggcatagcttccgttgcgctgcaggcgtcgcagcgccgttga

SEQ ID NO: 1102 - DNA, 1005 bp, Adenovirus D24
  MISC_FEATURE (1)..(1005): D24.orf00046 L2 pV
atgtcaaagcgcaaaatcaaggaggagatgctccaggtcgtcgccccggagatttacggaccaccccaggcggaccagaaaccccgcaaaatcaagcgggttaaaaaaaaggatgaggtggacgagggggcagtagagtttgtgcgcgagttcgctccgcggcggcgcgtaaattggaaggggcgcagggtgcagcgcgtgttgcggcccggcacggcggtggtgtttacgcccggcgagcggtcctcggtcaggagcaagcgtagctatgacgaggtgtacggcgacgacgacatcctggaccaggcggcggagcgggcgggcgagttcgcctacgggaagcggtcgcgcgaagaggagctgatctcgttgccgctggacgagagcaaccccacgcctagcctgaagcccgtgaccctgcagcaggtgctgccccaagcagtgctgctgccgagccgcggggtcaagcgcgagggcgagaatatgtacccgaccatgcagatcatggtgcccaagcgccggcgcgtggaagaagtgctggacaccgtgaaaatggatgtggagcccgaggtcaaggtgcgccccatcaagcaggtggcgccgggcctgggcgtgcagaccgtggacattcagatccccaccgacatggatgttgacaaaaaaccctcgaccagcatcgaggtgcagaccgacccctggctcccagcctccaccgctgccgtctccacttctaccgccgccacggctaccgagcctcccagaaggcgaagatggggccctgccaaccggctgatgcccaactacgtattgcatccttccattatcccgacgccgggctatcgcggcacccggtactacgccagccgcaggcgcccagccagcaaacgccgccgccgcaccgccacccgccgccgtctggcccccgcccgcgtgcgccgcgtaaccacgcgccggggccgctcgctcgttctgcccaccgtgcgctaccaccccagcatcctttaa

SEQ ID NO: 1103 - DNA, 585 bp, Adenovirus D24
  MISC_FEATURE (1)..(585): D24.orf00047 L2 pVII
atgtctattctcatctcgcccagcaataacaccggctggggtcttactaggcccagcaccatgtacggaggagccaagaagcgctcccagcagcaccccgtccgcgtccgcggccacttccgcgctccctggggcgcttacaagcgcgggcggacttctaccgccgccgtgcgcaccaccgtcgacgacgtcatcgactcggtggtcgccgacgcgcgcaactatacccccgccccctccaccgtggacgcggtcatcgacagcgtggtggccgacgcgcgcgactatgccagacgcaagagccggcggcgacggatcgccaggcgccaccggagtacgcccgccatgcgcgccgcccgggctctgctgcgccgcgccagacgcacgggccgccgggccatgatgcgagccgcgcgccgcgccgccactgcaccccccgcaggcaggactcgcagacgagcggccgccgccgctgccgcggccatttctagcatgaccagacccaggcgcggaaacgtgtactgggtgcgcgactccgtcacgggcgtgcgcgtgcccgtgcgcacccgtcctcctcgtccctga

SEQ ID NO: 1104 - DNA, 1545 bp, Adenovirus D24; identical to SEQ ID NO: 182
  MISC_FEATURE (1)..(1545): D24.orf00050 L2 penton

SEQ ID NO: 1105 - DNA, 1605 bp, Adenovirus D24
  MISC_FEATURE (1)..(1605): D24.orf00052 L1 pIIIa
atgcaacgcatcatggccctgacgacccgcaaccccgagtcctttagacaacagccgcaggccaacagactctcggccattctggaggcggtggtcccctctcggaccaaccccacgcacgagaaggtgctggcgatcgtgaacgcgctggcggagaacaaggccatccgtcccgacgaggccgggctggtgtacaacgccctgctggagcgcgtgggccgctacaacagcacaaacgtgcagtccaacctggaccggctggtgacggacgtgcgcgaggccgtggcgcagcgcgagcggttcaagaacgagggcctgggctcgttggtggcgctgaacgccttcctggcgacgcagccggcgaacgtgccgcgcgggcaggacgattacaccaactttatcagcgcgctgcggctgatggtgaccgaggtgccccagagcgaggtgtaccagtcgggcccagactactttttccagacgagccggcagggcttgcagacggtgaacctaagccaggctttcaagaatctgcgcgggctgtggggcgtgcaggcgcccgtgggcgaccggtcgacggtgagcagcttgctaacgcccaactcgcggctgctgctgctgctgatcgcgcccttcaccgacagcggcagcgtgaaccgcaactcgtacctgggccacctgctgacgctttaccgcgaggccataggccaggcgcaggtggacgagcagaccttccaggagatcactagcgtgagccgcgcgctgggtcagaacgacaccgacagtctgagagccaccctgaacttcttgctgacaaatagacagcagaagattccggcgcagtacgcgctgtcggccgaggaggagcgcatcctgagatatgtgcagcagagcgtagggcttttcctgatgcaggagggggccacccccagcgccgcgctggacatgaccgcgcgcaacatggaacctagcatgtacgccgccaaccggccgttcatcaataagctgatggactacctgcaccgcgcggctgccatgaactcggactactttactaatgctatactaaacccgcactggctcccgccgccggggttctacacgggcgagtacgacatgcccgaccccaacgatgggttcctgtgggacgacgtggacagcgcggtgttctccccgaccttgcaaaagcgccaggaggcggtacgcacgcccgcgagcgagggcgcggtgggtcggagcccctttcctagcttagggagtttgcatagcttgccgggctcggtgaacagcggcagggtgagccggccgcgcttgctgggcgaggacgagtacctgaacgactcgctgctgcagccgccgcgggtcaagaacgccatggccaataacgggatagagagtctggtggacaaactgaaccgctggaagacctacgctcaggaccatagggatgcgcccgcgccgcggcgacagcgccacgaccggcagcggggcctggtgtgggacgacgaggactcggccgacgatagcagcgtgttggacttgggcgggagcggtggggccaacccgttcgcgcatctgcagcccagactggggcgacggatgttttga

SEQ ID NO: 1106 - DNA, 1128 bp, Adenovirus D24
  MISC_FEATURE (1)..(1128): D24.orf00054 L1 52 kDa protein
atgcatcccgtcctgcgccaaatgcgtcccaccccccctccggcgaccaccgcgaccgcggccgtagcaggcgccggcgctgtagccccgccacagcagacagagatggacttggaagagggcgaagggctggcgagactgggggcgccgtccccggagcgacacccccgcgtgcagctgcagaaggacgtgcgcccggcgtacgtgcctgcgcagaacctgttcagggaccgcagcggggaggagcccgaggagatgcgcgactgccgttttcgggcgggcagggagctgcgcgagggcctggaccgccagcgcgtgctgcgcgacgaggatttcgagccgaacgagcagacggggatcagccccgcgcgcgcgcacgtggcggcggccaacctggtgacggcctacgagcagacggtgaagcaggagcgcaacttccaaaagagtttcaacaaccatgtgcgcacgctaatcgcgcgcgaggaggtggccctgggcttgatgcacctgtgggacctggcggaggccatcgtgcagaacccggacagcaagcctctgacggcgcagctgttcctggtggtgcagcacagcagggacaacgaggcgttcagggaggcgctgctaaacatcgccgagcccgagggccgctggctgctggagctgatcaacatcttgcagagcatcgtagtgcaggagcgcagcctgagcctggccgagaaggtggcggctatcaactactcggtgctgagcctgggcaagttttacgcgcgcaagatttacaagacgccgtacgtgcccatagacaaggaggtgaagatagacagcttttacatgcgcatggcgctcaaggtgctgacgctgagcgacgacctgggcgtgtaccgcaacgaccgcatccacaaggccgtgagcgcgagccggcggcgcgagctgagcgaccgcgagctgatgctgagtctgcgccgggcgctggtagggggcgccgccggcggtgaggagtcctacttcgacatgggggcggacctgcattggcagccgagccggcgcgccttggaggccgcctacggtccagaggacttggatgaggatgaggaagaggaggaggatgcacccgctgcggggtactga

SEQ ID NO: 1107 - DNA, 1854 bp, Adenovirus D24
  MISC_FEATURE (1)..(1854): D24.orf00057 pTP
atggactatttcctgccgctgcgcaacatctggaaccgcgtccgcgagttcccgcgcgcctccaccaccgccgccggcatcacctggatgtcccgctacctctacggctaccaccgcctcatgctcgaggacctggccccgggcgcgccggccacccagcgctggccgctctaccgccagccgccgccgcacttcctagttggataccagtacctcgtgcgcacctgcaacgactatgtcttcgactcgcgcgccttctcgcggctcaggtactcagaggtcgtgcaacccggcctgcagaccgtcaactggtcgctcatggccaactgcacctacaccatcaacaccggggcctaccaccgcttcgtcgacatggacgacttccaggacaccctcacccgcgtgcaacaggccatcctcgccgagcgcgtcgtcgccgacctggcgctcgtgcagccgctcaggggcgtcggggtcacccgcatggaagactccgcctccgccagtgatgacattgagaggctcatgcatgactactacaagaacctgagccggtgtcagggccaggcctggggcatggccgagcggcttcgcatccagcaagcgggacccaaggacctggtcctcctcgccaccatccgccgccttaaaaacgcctacttcaattacatcatcagcaaccgcaattctaacagcgtccacagggctgctacgtgtttgagcttaccttgcgactgcgattggctagacgctttcctcgaaagattctccgatccggtcgatctcgacgcgctcacgtcccctacaccgcaattgataagatgcatcgtcagcgccctctcgctgcccaacggggacccgccccattaccgggagatgaccggcggcgtcttcacgctgcgtcctcgcgaacggggtcgcgccgtcaccgaaaccatgcgtcgccgccgcggggagatgatcgagcgcttcgtcgaccgtctcccggtgcgtcgccgtcgtcgtcgggccccgccaccaccaccgcccccagaggaagaaatagaagaagaggtcgtcatggaagaagaggaagaggaggaggcccccggggatttcgagcgcgaggtgcgcgccaccatcgccgaactcatcaggctcctggaggacgagctcacggtctcggcccgcaacgcccagtttttcaacttcgctgtggatttctacgaggccatggaaaggctggaggccatcggcgacatcagcgagatgcccctgcgccgctggatcatgtacttcttcgtcaccgagcacatcgccaccaccctaaactacctcttccagcgcctgcgcaactacgccgtcttcacgcggcacgtggagctcaacctcgcgcaggtggtcatgcgcgcgcgcgacgccgacggggacgtggtctacagccgcgtctggaatgagagcggcctgggcgccttctcgcagctcatgggtcgcatctccaatgacctcgccgccaccgtggagcgcgcgggccgcggcgatctccaggaggaggagatcgagcagttcatgtccgagatcgcctaccaggacaactcgggcgacgtgcaagagatcctgcgtcaggccgccgtcaatgacgccgagattgattctgttgaactgtctttcaggttcaaagtcacggggccggtggtcttcacgcagaggcggcagatccaggatgtcaaccgccgcgtcgtcgcgcacgccagcgctctcagggcgcagcaccgggacctgcccgagcgccacgccgacgtgcctctgccgcccctgcccgcggggccggaaccgccgctgccgccgggagcgcgtccgcgacaccgcttctaa

SEQ ID NO: 1108 - DNA, 3276 bp, Adenovirus D24
  MISC_FEATURE (1)..(3276): D24.orf00058 E2B DNA polymerase
atgcaatgcgtggacacagccaccaactcacccgtggagatcaagtaccatctgcatctcaagcacgccctcacccgcctctacgaggtcaacctcagaaccctgcccccggacctggatctccgcgacaccatggacagctcccaactgcgcgccctcgtcttcgctctccgcccccgccgcgccgagatctggacctggctcccgcgcgggctcgtcagcctctccgtcctcgaggagccccagggtgagtcccacgcaggcgaacatgaaaaccaccagccagggccgccactcctgaagttcctcctcaagggacgcgctgtgtatctcgtggatgaggtacagcccgtgcagcgctgcgagtactgcggacgcttttacaagcatcagcacgagtgctcggttcgccggcgggatttctactttcatcacatcaacagccactcgtccaactggtggcaggaaatccagttcttcccaatcggctctcatcctcgcacggagcggctctttgtcacctacgatgtagaaacctacacctggatggggtccttcggcaagcagctcgtcccctttatgctggttatgaaattctcgggggacccagagctggtcgccctcgctcgcgatctagccgtgcgcttacgctgggatcgctgggagcgggacccccttactttctactgcgtcaccccagaaaagatggccgtgggccagcagttccgcctctttcgcgacgagctccagacccttatggcccgcgagctctgggcttcattcatgcaagccaacccacatctccaggagtgggcgctcgagcagcacggactgcattgccccgaggacctcacctacgaggagctcaaaaagctgccgcacattaaaggccgcccgcgattcatggaactctacatcgtcgggcacaacatcaacggcttcgacgagatcgtcctcgccgcccaggtcatcaacaaccgagcctccgtcccgggccctttccgcatcacccgcaatttcatgccgcgggcaggcaagattctcttcaatgacgtcactttcgctctgcctaaccccctctcgaagaagcgcaccgatttcgagctctgggagcacggcggctgcgacgactcggatttcaagtaccagttcttgaaagtcatggtcagggataccttcgccctgacgcacacctcgctccgcaaggccgctcaagcttacgccctccccgtggagaagggctgctgtccctacaaggccgtgaaccatttctacatgctgggctcttaccgtgcggacgatcgaggattcccgctccgggagtactggaaggatgacgaggagtacgccctcaaccgcgagctatgggagaagaaaggagaggcgggttatgacatcatccgcgaaacgctggactactgcgccatggacgtcctcgtcaccgccgagctcgtcgccaagctgcaagactcctacgcgcacttcatccgcgactcggttcgtctgcctcatgcccactttaacatcttccaacggcccaccatctcctccaactcgcatgccatctttcgccagatcgtcttccgcgccgagcagccccagcgcaccaatctcggccccgccttcttggccccctcgcacgagttgtatgactacgtgcgcgccagcatccgcggggggcgctgttatcccacctacatcggcatcctctcggagcccatctatgtctacgacatctgcggcatgtacgcctccgccctgacgcatcccatgccctggggtccgcccctcaacccctacgagcgagcgctggccgcccgcgagtggcagatggccttggatgatgcatcctcaaaaatcgattattttgacaaggaactctgtccgggcatcttcaccatcgatgcggacccccctgacgagcatctgcttgatgtgctgcccccgttctgctcgcgcaagggcggacgcctctgctggaccaacgagcccctgcgcggcgaggtggccaccagcgtggatctggtcaccctgcataaccgcggctggcgcgtcaggatcgtgcccgacgagcgcaccaccgtcttccccgaatggaagtgcgtcgcgcgcgagtatgtccagctcaacatcgcggccaaggagcgagccgaccgtgacaaaaatcagaccatgagatccatcgccaagcttctctccaacgccctctatggctccttcgccaccaagcttgacaataaaaaaatagtcttttctgaccagatggatgaaagtctcctaaaaagcattgcggcagggcaagccaacatcaaatcctcctcgtttctagaaactgacaacctgagtgccgaggtcatgcccgctctcgaaagggaatacctaccccaacagctggcgctcgtggacagcgacgcggaagagagtgaggacgagcacagacccgcccccttttatacccccccgtcggggaccccgggtcacgtggcctacacctacaagccaatcaccttcttggatgcggaggagggggacatgtgtctgcataccgtggaaaaggtggaccccctggtggacaacgaccgctacccctcgcacgtggcctcctttgtcttggcgtggacgcgcgccttcgtctcagagtggtccgagtttctctacgaggaggaccgcgggacgcccctgcaggacaggcccatcaagtccgtctacggggacacagacagcctgtttgtcaccgagcgcggacacagactcatggagacgcgaggtaagaagcgcatcaaaaagaacgggggaaaactggtttttgaccccgagcagcccgagctcacctggctggtcgagtgcgagaccgtctgcgcccactgcggagcggatgctttcgcccccgagtccgtctttctcgcacccaagctctacgccctgcaatccctcctctgtcccgcctgcgggcgctcttccaagggcaagctccgcgccaagggccacgccgccgaggccctcaactacgagctcatggtcaactgctatctcgccgacgcgcagggcgaagaccgtgcccgtttcagcaccagcaggatgagtctcaagcgcacccttgcaagcgcacagcccggggcccaccccttcaccgtgacggagaccacgctcacgcggacactgagaccctggaaggacatgacgctggcagcgctggacgcccatcgtctcgtgccctacagtcgcagtcgtcccaacccccgaaacgaggaagtctgctggatcgagatgccgtag

SEQ ID NO: 1109 - DNA, 1047 bp, Adenovirus D24
  MISC_FEATURE (1)..(1047): D24.orf00059 pIVa2 protein
atgcccatggccgacgggctcaagcccctgaaaaactttgcttccctgcaagagctgctctcgctgggcggggaccgcctcctcggcgagctcgtccgggaaaacctccaagtcagagacatgctcaacgaggtggcccccctcctccgggacgacggcagctgcatgtccttgaactaccacctgcaacccgtcatcggggtcatctacggcccgaccgggtgcggcaagtcccagctgttgagaaacctgctctcctcgcagctcatcacccccgccccggaaaccgtttttttcatcgccccgcaggtggacatgatccccccctccgagatgaaagcctgggagatgcaaatatgtgaggggaacttcgccccggggcccgagggaaccattgtcccccaatctggcaccctccgccccaaattcattaaaatgtcttatgatgatctcacccaggagcataattacgatgtctctgaccccagaaacgtctttgccaaagccgcagcccacgggcccatcgccatcatcatggatgagtgcatggaaaacctgggtgggcacaagggcgtctccaaattctttcacgcattcccttccaagttgcatgacaagttccccaagtgcacgggctacaccgttctggtggtcctgcacaacatgaaccccaggcgggatctgggtggcaacatcgccaacctcaagatccaggccaaactccacatcatctccccccgcatgcatccctcccagctcaaccgcttcgccaacacctacaccaaggggctccccgtggccatcagtctcctcctcaaggacatcatccagcaccacgcccagcgcccctgctatgactggatcatctacaacacgaccccagagcacgaggccatgcagtggtgctacctccacccccgggacgggctcatgcccatgtacctcaacatccaatcccacctctaccgggtcctggaaaaaatccaccgcactctcaatgatcgggagaggtggaccagggcctaccgcgcgcgaaaaaataaataa

SEQ ID NO: 1110 - DNA, 405 bp, Adenovirus D24
  MISC_FEATURE (1)..(405): D24.orf00062 IX pIX
atgaacgggactggcggggccttcgaaggggggctttttagcccttatttgacaacccgcctgccgggatgggccggagttcgtcagaatgtgatgggatcgacggtggacgggcgtccagtgcttccagcaaattcctcgaccatgacctacgcgaccgtggggaactcgtcgctcgacagcaccgccgcagccgcggcagccgcagccgccatgacagcgacgagactggcttcgagctacatgcccagcagcagcagtagcccctctgtgcccagttccatcatcgccgaggagaaactgctggccctgctggccgagctggaagccctgagccgccagctggccgccctgacccagcaggtgtccgagctccgcgaacagcagcagcagcaaaataaatga

SEQ ID NO: 1111 - DNA, 1488 bp, Adenovirus D24
  MISC_FEATURE (1)..(1488): D24.orf00063 E1B 55 kDa protein
atggagccagaacacccaactgagcaggggctacattctggacttcgcagccatgcacctgtggagggcatgggtgaggcagcggggacagagaatcttgaactactggcttatacagccagcagctccgggtcttcttcgtctacacagacaaacatccatgttggaggaagaaatgaggcaggccatggacgagaacccgaggagcggcctggaccctccgtcggaagaggagctggattgaatcaggtatccagcctgtacccagagcttagcagggtgctgacatccatggccaggggagtgaagagggagaggagcgatgggggcaataccgggatgatgaccgagctgacggccagcctgatgaatcgcaagcgtccagagcgcattacctggcacgagctacagatggagtgtagggatgaggtgggcctgatgcaggataaatatggcctggagcagataaaaacccactggttgaacccagatgaggattgggaggaggccattaagaaatatgccaagatagccctgcgcccagattgcaagtacagggtgaccaagacggtgaatatcagacatgcctgctacatctcggggaacggggcagaggtggtcatcgataccctggacaaggccgccttcaggtgttgcatgatgggaatgagagccggagtgatgaatatgaattccatgattttcatgaacatgaagttcaatggagagaagtttaatggggtgatgttcatggccaacagtcacatgaccctgcacggctgcagtttcttcggcttcaacaatatgtgcgcagaggtctggggcgctgctaagatcaggggatgtaagttttatggctgctggatgggcgtggtcggaagacccaagagcgagatgtctgtgaagcagtgtgtgtttgagaaatgctacctgggagtctctaccgagggcaatgctagagtgagacattgctcttccctggagacgggctgcttctgcctggtgaagggcacagcctctctgaagcataatatggtgaagggctgcacggatgagcgcatgtacaacatgctgacatgcgactcgggggtctgccatatcctgaagaacatccatgtgacctcccacccccggaagaagtggccagtgtttgagaataacctactgatcaagtgccacatgcacctgggcgccagaaggggcaccttccagccgtaccagtgcaactttagccagaccaagctgctgctggagaacgatgccttctccagggtgaacctgaacggcatctttgacatggatgtctcggtgtacaagatcctgagatacgatgagaccaagtccagggtgcgcgcttgcgagtgcgggggcagacacaccaggatgcaaccagtggccctggatgtgaccgaggagctgaggcccgaccacctggtgatggcttgtaccgggaccgagttcagctccagtggggaggacacagattag

SEQ ID NO: 1112 - DNA, 207 bp, Adenovirus D24
  MISC_FEATURE (1)..(207): D24.orf00065 E1A 14.8 kDa protein
gtgtcagaggatgagtcatcaccctcagaagaagaccacccgtgtccccctgagctgtcaggcgaaacgcccctgcaagtgcacagacccaccccagtcagacccagtggcgagaggcgagcagctgttgaaaaaattgaggacttgttacatgacatgggtggggatgaacctttggacctgagcttgaaacgccccaggaactag

SEQ ID NO: 1113 - DNA, 549 bp, Adenovirus D24
  MISC_FEATURE (1)..(549): D24.orf00068 E1A 28 kDa protein
gtgcctattgacatggccgcattattgctggaggattatgtgagtacaatattggaggacgaactgcatccatctccatttgagctgggacctacacttcaggacctatatgatttggaggtagatgcccatgatgacgacccgaacgaagaggctgtgaatttaatatttccagaatctctgattcttcaggctgacatagccagcgaagctgtacctacaccacttcatacaccgactctgtcacccatacctgaattggaagaggaggacgagctagacctccgatgttatgaggaaggttttcctcccagcgattcagaggacgaacagggtgagcagagcatggctctaatctcaaaatatgcttgtgtggttgtggaagagcattttgtgttggacaatcctgaggtgcccgggcaaggctgtagatcctgccagtaccaccgggataagaccggagacacgaacgcctcctgcgctctgtgttacatgaaaaagaacttcagctttatttacagtaagtggagtgaatgtgagagagactga

SEQ ID NO: 1114 - DNA, 378 bp, Adenovirus D25
  MISC_FEATURE (1)..(378): D25.orf00002 E4 ORF1 protein
atggctgaatctctgtatgctttcatagatagccctggagggattgctcccgtccaggaagggactagcaatagatatacctttttttgcccagaatctttccacattcctccgcatggggtggttttggttcacttgagagtgagcgtgctgattcctaatggctaccaaggcagatttatggccttgaatgactaccattccaggggcatactaacccagtccgatgtgatctttgctgggagaagacaggagctaactgtgctgctctttaaccacacggatcgatttttgtatgtccgagagggccacccagtgggcactttgctgctggagagagtgatttttccttcagtgagactggcaactctggtttag

SEQ ID NO: 1115 - DNA, 393 bp, Adenovirus D25
  MISC_FEATURE (1)..(393): D25.orf00003 E4 ORF2 protein
atgcttgagcgacacgctgtcagctaccacattgtggttcctggggtcctagtgacttatttagaggacttttctattactcaaatgattaaagaaaaactacctcgctttatcactcacctattggaaggcatcaccggtgacacaaagagagcttattccagcatgcagtttttgggtgctagctttggagcattaaagtactcactcacgcttgccagtcccacgcttagccctggctctgaattgtcagctgtagtggctgaggacttgagtgactttttgcagctgacgctgagacgtgagctgagggcagagggcagaacctcattgaatcttgttgttttgaacacgctgcaggtggtggagcagcaggatctgtttctaatatga

SEQ ID NO: 1116 - DNA, 354 bp, Adenovirus D25
  MISC_FEATURE (1)..(354): D25.orf00005 E4 ORF3 protein
atgaaggtctgcctgattatgaaagtggagggggcgctgtgggaacttttccacatgtgcggagtggacttacaccaacaatttgtagaaataatccaaggctggaaaaatgagaattacctggggatggtgaatgagtgtaacctgatgattgatgaaatcgatggaggtccagcctttaatgtgattcttatgctggatgtacgcgtagagccactgctcgaagccacagtcgagcaccttgaaaatagagtgggttttgacctggctgtctgtttccaccagcacagcggcggggaacgctgtcacctgcgtgacttgcactttatcgtccttcgagaccgcttggaataa

SEQ ID NO: 1117 - DNA, 363 bp, Adenovirus D25
  MISC_FEATURE (1)..(363): D25.orf00007 E4 ORF4 protein
atggttcttccagttcttcccccacctcctcttcatgatagatcaggatgcattaactggattgggatggcctacaatgtcctggctgatgttttaaggggaatccgcatcgacgggacttttgtttcatcagatgcacaggagctgctggagaacctgcgggaatggctgtacttcagttggatgactgagcgtcagcagcggaaggacagcaggaggaaaggtatctgctgttcccgagccactttctgctggcagaagtacgacaaggtacgcaagagaatccatttcaatgtccaccgaggaacagtcgagctcgctccgccatcatccttaccgcagggcccgtttaccacgatgtga

SEQ ID NO: 1118 - DNA, 663 bp, Adenovirus D25
  MISC_FEATURE (1)..(663): D25.orf00010 E4 34.1 K E4 ORF6 34.1 kDa protein
atgatcctgaccccagaggaaataaaaattttaaaaagatgtatgtcagtgtgcctgtgccccgctaccctggacttggtgagagctcagatggtgagcgggtacgagcgctggatcctgcattgccactgttcatccccgggctccctgcagtgtcgggcgggaggcaccctgctggccgtgtggttcaggagagtcatttacgggtgcatgttcaaccagcgattcccatggtaccgccagattgtgaacagaaacatgcccaaagagatcatgtatatgggcagtgtgttcatgaggggcaggcacctgatatactgccgcatctggtacgatggtcacgtgggttcaataatccccaacatgagctttggctggagcgccctgaattatgggctgctgaataacatggtgattatgtgctgcacttactgtgagaacatggcagagatcaggatgcggtgctgtgcccgacgcaccaggagactgatgctgaaggctgtggggatcatagtcagagagacttgcgatcccgatcccatctgcagcagccgcaccgagccccggcggcagagactgttgagggcgctgatggagaggcacagacccatcctgttttccgagtatgaatctgtgcgttcttctcattccaccagactgtga

SEQ ID NO: 1119 - DNA, 246 bp, Adenovirus D25
  MISC_FEATURE (1)..(246): D25.orf00011 E4 ORF6/7 protein
gtgaccttggactgtgaggcccgcttggatgacttttcagaggacggcttcatctcaatcaccgacccccgtttggctcgccaggaaactgtgtggattatagaccccaagtcaagttcccgcactaatcagaacatttccctatttaaggccacccgtgctgaaagaaccgtgtacactgtgaaatgggctggtggtgggagactaactacccgtgctggtgtaaaaatcaataaagatacatga

SEQ ID NO: 1120 - DNA, 1098 bp, Adenovirus D25; identical to SEQ ID NO: 153
  MISC_FEATURE (1)..(1098): D25.orf00012 L5 fiber

SEQ ID NO: 1121 - DNA, 150 bp, Adenovirus D25
  MISC_FEATURE (1)..(150): D25.orf00013 U protein
atgaaaattgtggaccaggaatttgacatccctttcaaggtgtggagaaagtttgccgcccgccggggacttgagtaccagagctgggaggagggtactgaggtgttgctgaacaactacaccagagacatactttcagatttcaagtaa

SEQ ID NO: 1122 - DNA, 390 bp, Adenovirus D25
  MISC_FEATURE (1)..(390): D25.orf00014 E3 14.5 kDa protein
atgactgaccacttggacctcgagatggacggccaggcctccgagcagcgcaccctgcaactgcgcgtccgtcagcagcaggagcgggccgccaaggagctcctcgatgccatcaacatccaccagtgcaagaagggcatcttctgcctggtcaaacaggcaaagatcacctacgagctcgtgtccggcggcaagcagcatcgcctcgcctatgagctgccccagcagaagcagaagttcacctgcatggtgggcatcaaccccatagtcatcacccagcagtcgggcgaggccagcggctgcatccactgctcctgcgaaagccccgagtgcatctactccctactcaagaccctttgcggactccgcgaccttctccccatgaactga

SEQ ID NO: 1123 - DNA, 276 bp, Adenovirus D25
  MISC_FEATURE (1)..(276): D25.orf00016 E3 RID-beta
atggatatgccttcctattacttggtgattgttggggtagtcatggtctgctcctgcactttctttgccatcatgatctacccctgttttgatctcggctggaattctgttgaggcattcacatacacactagaaagcagttcactagcctccacgccaccacccacaccgcctccccgcagaaatcagtttcccatgattcagtacttagaagagccccctccccgacccccttccactgttagctactttcacataaccggcggcgatgactga

SEQ ID NO: 1124 - DNA, 276 bp, Adenovirus D25
  MISC_FEATURE (1)..(276): D25.orf00017 E3 RID-alpha
atgattcctaggttcttcctatttaacatcctcttctgtctcttcaacatctgcgctgccttcgcggccgtctcgcacgcctcacccgactgtctcgggcccttccccacctacctcctctttgccctgctcacctgcacctgcgtctgcagcattgtctgcctggtcatcaccttcctgcagctcatcgactggtgctgcgcgcgctacaattacctgcatcacagtcccgaatacagggacgagaacgtagccagaatcttaaggctcatatga

SEQ ID NO: 1125 - DNA, 891 bp, Adenovirus D25
  MISC_FEATURE (1)..(891): D25.orf00019 E3 CR1-gamma
atgaaggctttcacagcttgcgttctgattagcatagtcacattagtatcagctgattacaaacaagttcaagttagcagaggaggaaatattacattagatggaccattcgataatactacatggacaagatatcataatgatggacataaaaatggttggatgaaaatttgcacatggactggagcaacatataaatgtcacaataatggaagcattactatttttgctttcaacattacatccggagtttacaaagcagaagggtataaaaaagaagttagaacattttcatctagaaatcaaaaacatacaattgaagattctggagattatgaacaacaaaaaatatatctatataatctaacaataattgaaccgccaactactaaagcacccaccacagttagaacaaccacgcagacaactactagggaaacaacacagcctactactgtacccactacacatccaaccaccacagtcagtacaactactgacaccacaactcacactacacatctagacactacagtgcagaatactactttattgattgggtttttactaagaggaaatgaaagtactactgatcagacagaggctacctcaagtgccttcagcagcactgcaaatttaacttcgcttgcttcggtaaatgagacgatcgtgccgatgatgtatggccaacattacccaggtttggatatacaaattactttcctgattgtctgtggggtctttatcctcgctgtccttctctactttgtctgctgcaaggccagagaaaaatctaggcggcccatctacaggccagtaatcggggaacctcagccactccaagtggatggaggcttaaggaatcttctcttctcttttacagtatggtga

SEQ ID NO: 1126 - DNA, 1284 bp, Adenovirus D25
  MISC_FEATURE (1)..(1284): D25.orf00020 E3 CR1-beta
atgaatacagtgatccgtatcgtgctgctctctcttcttgtagcttttagtcaggcaggatttcatactatcaatgctacatggtgggctaatataactttagtggggccctcagatacgccagtcacctggtatgataaacagggaatgcagttctgtgatggaaatacagttaagaatcctcaaataagacatgagtgtaatgagcaaaaccttacactaattcatgtgaacaaaacccatgaaaggacatacatgggttataatagacagagtactcataaggaagactataaagtcatagttataccgcctcctcctgctactgtaaagccacagtcaggtccagagtatgtatatgttaatatgggagagaacaaaaccttagttggacctccaggaataccagttacttggtatgacggagaaggaaataaattctgcgatggagaaaaagttgaacatgcagaatttaatcatacatgtgatgtgcaaaatcttacactgttgtttataaatcttacacatgatggggcttatcttggctataatcaccagggaactaaaagaacttggtatgaggttgtagtgacagatggttttccaaaatcaggggagatgaaaatcgaagatcagagtagacaaacagaacaaaaacaaactgggcaaaaacaaaatgagcataaacagggtgggcagaaacaggaggggcaaaaagagacaagtcaaaagaaagctagtgacaaacagaaggcgacacacaggaggccatcaaaactaaagccgcacacacctgaagcaaaactgattacagtttgtagtgggtctaacttaacattacttgggccagatggaaaggtcacttggtatgatgatgatttaaaaagaccatgcgagcctgggtataagttagagtgtaagtgtgacaatcaaaacctaacactaatcaatgtaactaaactttatgagggagtttactatggtactaatgacagaggcaacagcaaaagatacagagtaaaattaaacactactaattctcaaagtgtgaaaattcagccgtacaacagacctactactcctgatcagaaacacagatttgaattgcaaattgattctaatcaagacaatgacaaaattccatcaaccactgtggcaatcgtggtgggagtgattgcgggcttcataactataatcattgtcattctgtgctacatctgctgccgcaagcgtcccagggcatacaatcatatggtagacccactactcagcttctcttactga

SEQ ID NO: 1127 - DNA, 255 bp, Adenovirus D25
  MISC_FEATURE (1)..(255): D25.orf00022 E3 gp 17.5 kDa protein
atgcagtgtgatatcacacatgacttcaaaaatgaatttgaaaccgaaagtgtgatttccattgctaccatggacagtgaccgtgtagttctgctcatctcctggttcccaatcgcccacccatgcatttcccatggtcttattcttgaatgtgatgttgagaggacatgtatgctcgcatttgatgactactgtgcatatcacactcctctcattgcctgtggtgatgttacatcgtggctgttcgtggcatga

SEQ ID NO: 1128 - DNA, 192 bp, Adenovirus D25
  MISC_FEATURE (1)..(192): D25.orf00023 E3 gp 17.5 kDa protein
atgtgtgatatcacactgcatgtggctagacttcatggcttgtggccccctaccaaggagaacatggttgggttttctttggcttttgtgatcatggcctgtgcaatgtcaggtctgctggtaggggctataatatggttcctgaggcacaagcccaggtatggaaatctggaaaaggaaaaattgctataa

SEQ ID NO: 1129 - DNA, 594 bp, Adenovirus D25
  MISC_FEATURE (1)..(594): D25.orf00024 E3 CR1-alpha
atgagaatttttgctgtactctttgtggtgagtttaataaaagctaaactcttgcaatactctggaccttgtcgtcgtcaactcaacaagaccttcaacctcaccaaccagactgaggtaaaactcaactgcagaccaggggacaaatacatcctctggctctttgagaacacttccttcgcagcctccaacacctgtgccaacgacggtattgaaatacccaacaaccttaccagtggactgacttacaccaccagaaagactaagctagtgctctacaatccttttgtagagggaacctaccactgccagagcggaccttgctaccacactttcactttggtgaacgttaccggcagcagcacagccgctccagaaacatctaaccttctttttgatactaacactcctaaaaccggaggtgagctctgggttccctctctgacagaggggggtaaacatattgaagcggttgggtatttgattttaggggtggtcctgggtgggtgcatagcggtgctgtattaccttccttgctggatcgaaatcaaaatctttatctgctgggtcagacattgttgggaggaaccatga

SEQ ID NO: 1130 - DNA, 321 bp, Adenovirus D25
  MISC_FEATURE (1)..(321): D25.orf00025 E3 12.2 kDa protein
atgtcctatggtgactcggctgagctcgctcggttgaggcatctggaccactgccgccgcctgcgctgcttcgcccgggagagctgcggactcatctactttgagtttcccgaggagcaccccaacggccctgcacacggagtgcggatcaccgtagagggcaccaccgagtctcacctgatcaggttcttcacccagcaacccttcctggtcgagcgggaccggggcgccaccacctacaccgtctactgcatctgtcctaccccgaagttgcatgagaatttttgctgtactctttgtggtgagtttaataaaagctaa

SEQ ID NO: 1131 - DNA, 684 bp, Adenovirus D25
  MISC_FEATURE (1)..(684): D25.orf00026 L4 pVIII
atgagcaaggagattcccaccccttacatgtggagctatcagccccagatgggcctggccgcgggcgcctcccaggactactccacccgcatgaactggctcagtgccggcccctcgatgatctcacgggtcaacggggtccgtaaccatcgaaaccagatattgttggagcaggcggcggtcacctccacgcccagggcaaagctcaacccgcgtaattggccctccaccctggtgtatcaggaaatccccgggccgactaccgtactacttccgcgtgacgcactggccgaagtccgcatgactaactcaggtgtccagctggccggcggcgcttcccggtgcccgctccgcccacaatcgggtataaaaaccctggtgatccgaggcagaggcacacagctcaacgacgagttggtgagctcttcgatcggtctgcgaccggacggagtgttccaactagccggagccgggagatcgtccttcactcccaaccaggcctacctaaccttgcagagcagctcttcggagcctcgctccggaggcatcggaaccctccagtttgtggaggagtttgtgccctcggtctacttcaaccccttctcgggatcgccaggcctctacccggacgagttcataccgaacttcgacgcagtgagagaagcggttgacggctacgactga

SEQ ID NO: 1132 - DNA, 219 bp, Adenovirus D25; identical to SEQ ID NO: 912
  MISC_FEATURE (1)..(219): D25.orf00027 L4 20 kDa protein

SEQ ID NO: 1133 - DNA, 186 bp, Adenovirus D25; identical to SEQ ID NO: 949
  MISC_FEATURE (1)..(186): D25.orf00028 L4 22 kDa protein

SEQ ID NO: 1134 - DNA, 2196 bp, Adenovirus D25
  MISC_FEATURE (1)..(2196): D25.orf00030 L4 100 kDa protein
atggaggagcagccgcgtaagcaggagcaggaggaggacttaaccacccacgagcaacccaaaatcgagcaggacctgggcttcgaagagccggctcgtctagaacccccacaggatgaacaggagcacgagcaagacgcaggccaggaggagaccgacgctgggctcgagcatggctacctgggaggagaggaggatgtgctgctgaaacacctgcagcgccagtccctcatcctccgggacgccctggccgaccggagcgaaacccccctcagcgtcgaggagctgtgtcgggcctacgagctcaaccttttctcgccgcgcgtgccccccaaacgccagcccaacggcacctgcgagcccaacccgcgtctcaacttctatcccgtctttgcggtccccgaggcccttgccacctatcacatctttttcaagaaccaaaagatcccagtctcctgccgcgccaaccgcacccgcgccgacgcgctcctcgctctggggcccggcgcgcgcatacctgatatcgcttccctggaagaggtgcccaagatcttcgaagggctcggtcgggacgagacgcgcgcggcgaacgctctgaaagaaacagcagaggaagagggtcacactagcgccctggtagagttggaaggcgacaacgccaggctggccgtgctcaagcgcagcgttgagctcacccacttcgcctaccccgccgtcaacctcccgcccaaggtcatgcgtcgcatcatggatcagctcatcatgccccacatcgaggccctcgatgagacccaagagcagcgcccagaggacgcccggcctgtggtcagcgacgagcagctcgcgcgctggctcgggacccgcgacctccagaccctggagcagcggcgcaagctgatgctggccgtggtcctggtcaccctcgagctcgaatgcatgcgccgcttcttcagcgaccccgagaccctgcgcaaggtcgaggagaccctgcactacactttcaggcacggcttcgtcaggcaggcctgcaagatctccaacgtggagctgaccaacctggtctcctgcctggggatcctgcatgagaaccgccttgggcagaccgtgctccactctaccctgaagggcgaggcgcggcgggactatgtccgcgactgcatctttctatttctctgccacacatggcaagcagccatgggcgtgtggcagcagtgtctcgaggacgagaacctaaaggagctggacaagcttcttgctagaaaccttaaaaagctgtggacgggcttcgacgagcgcaccgtcgcctcggacctggccgagatcgtcttccccgagcgcctgaggcagacgctgaaaggcgggctgcccgactttatgagccagagcatgttgcaaaactaccgcactttcattctcgagcgatcggggatcctacccgccacctgcaacgccttcccctccgactttgtcccgctgagctaccgcgagtgtcccccgccgctgtggagccactgctacctcttgcagctggccaactacatcgcctaccactcggacgtgatcgaggacgtgagcggcgaggggctgctcgagtgccactgccgctgcaacctgtgctccccgcaccgctccctggtctgcaacccccagctcctaagcgagacccaggtcatcggtaccttcgagctgcaaggtccggagaagtccaccgctccgctgaaactcacgccggggttgtggacttccgcgtacctgcgcaaatttgtacccgaggactaccacgcccacgagataaagttcttcgaggaccaatcgcgccctcagcacgcggatctcacggcctgcgtcatcacccagggcgcgatcctcgcccaattgcacgccatccaaaaatcccgccaagagtttcttctgaaaaagggtagaggggtctaccttgacccccagacgggcgaggtgctcaacccgggtctcccccagcatgccgaggaagaagcaggagccgctagtggaggagatggaagaagaatgggacagccaggcagaggaggacgaatgggaggaggagacagaggaggaagaattggaagaggtggaagaggagcaggcaacagagcagcccgtcgccgcaccatccgcgccggcagccccgccggtcacggatacaacctccgctccggtcaagcctcctcgtag

SEQ ID NO: 1135 - DNA, 1470 bp, Adenovirus D25
  MISC_FEATURE (1)..(1470): D25.orf00032 E2A DNA-binding protein
atggccggcggcagtcaggacgtgcgccggttcatggaccgagaggccactccgccccggggccacggttcagcgcgctatccgccggagcaggagaggagcccctcgccgccacctcctctgcccaccaagcgccgaaagtatcagcgggtgggctccgggtcttccgaggaggacgtggtccccgtggacagccctccaaaaaagaagcaagccagaaagaccaagcatgtgaccaaggtagaccccgacgaagagatgccccaggaagaagccgtgatcgtgggagtgggattcagccagccgccggttctgttgaaggaaggcaaggacggaaaacgcatcgtcgagcccgcgacccccggtgtcctgaacgtgcgcaaccccctgagtctgcctctggtctcgtcctgggagaagggcatggataccatgaacgtgctgatggaacgctaccgcgtcgacagcggcctgcgcgatgcttacaagctcatgcccgaacagaccgagatcttccaaaagatgtgccagacctggatgaacgaggaggcccgcggtctgcaactgaccttcaccacccagaaagcatttagcaccatcatgggccgcatgttgcaaggttacatcttcagccacagcgggattgcgcacaagaactgggagtgcaccggctgcgccctgtgggatcacggctgcaccgaggtggaaggccagctcaagtgtctgcatggaacggtgatgatccacaaggatcacgtggtggagatggatgtgaccagcgagaacgggcagcgcgcgttgaaggagcagcccagcaaggccaaggtgacccagaaccgctggggacggagcgtggtgcaactgaccagccatgacgcgcgctgctgcgtgcatgatgccggttgcgggaataaccagttcagcgggaagagctgcgggctgtttttcagcgagggggccaaggcccagcaagctttcaagcagatctcggcatttgtcaaggccctctacccgaatatgcagcgcggcgcggggatgatgctaatgcccgttcactgcgagtgtaaccacaagcctcagagcgtgcccttcttgggccgccagctgtgcaagatgaccccgttcggcctgagcaacgccgaggacctggacaaggatcagatcagcgacaagagcgtgctggccagtgtgaagcaccccagtctgatggtgttccagtgctgcaaccccgtgtaccgcaactcgcgcgcgcagagcaccggtcccaactgcgatttcaagatatccgcgcctgacatattgggcgccctgcagatgagccggcgcatgtggagcgagaccttccccgagattccggttcccaaactggtgatccccgagttcaagtggcagcccaagttccagtaccgcaacgtggccctccccagcgcggcgcacaacgacgagcgcgagaaccccttcgacttttaa

SEQ ID NO: 1136 - DNA, 630 bp, Adenovirus D25
  MISC_FEATURE (1)..(630): D25.orf00033 L3 23.6 kDa protease
atgagcggctccagcgaacgagagctcgcggccatcgtgcgcgacctgggctgcgggccctactttttgggcacccacgacaagcgcttcccgggcttcctcgccggcgacaagctggcctgtgccatcgtcaacacggccggccgcgagaccggaggcgtgcactggctcgccttcggctggaacccgcgctcgcgcacctgctacatgttcgacccatttgggttctcggaccgccggctcaagcagatttacagcttcgagtacgaggctatgctgcgccgcagtgccctggcttcctcgcccgaccgctgtctcagcctcgaacagtccacccagaccgtgcaggggcccgactccgccgcctgcggacttttctgttgcatgttcttgcatgccttcgtgcactggcccgaccgacccatggacggaaaccccaccatgaacttgcttacgggggtgcccaacggcatgctacaatcgccacaggtgctgcccaccctccggcgaaaccaggaggaactctaccgcttcctcgcgcgccactccccttactttcgatcccaccgcgccgccatcgaacacgccaccgcttttgacaaaatgaaacaactgcgtgtatctcaataa

SEQ ID NO: 1137 - DNA, 2838 bp, Adenovirus D25; identical to SEQ ID NO: 213
  MISC_FEATURE (1)..(2838): D25.orf00036 L3 hexon

SEQ ID NO: 1138 - DNA, 651 bp, Adenovirus D25
  MISC_FEATURE (1)..(651): D25.orf00037 L3 pVI
atgggcacctggaacgagatcggcaccagccagctgaacgggggcgccttcaattggagcagtgtctggagcgggcttaaaaatttcggctcgacgctccggacctatgggaacaaggcctggaatagtagcacggggcagttgttaagggaaaagctcaaagaccagaacttccagcagaaggtggtggacggcctggcctcgggcattaacggggtggtggacatcgcgaaccaggccgtgcagcgcgagataaacagccgcctggacccgcgaccgcccacggtggtggagatggaagatgcaactcctccgccgcccaaaggcgagaagcggccgcggcccgacgcggaggagacgatcctgcaggtggacgagccgccctcgtacgaggaggccgtgaaggccggcatgcccaccacgcgcatcatcgcgccgctggccacgggtgtaatgaaacccgccacccttgacctgcctccaccacccacgcccgctccaccgaaggcagctccggtcgtgcaggcccccccggtggcgaccgccgtgcgccgcgtccccgcccgccgccaggcccagaactggcagagcacgctgcacagtatcgtgggcctgggagtgaaaagtctgaagcgccgccgatgctattga

SEQ ID NO: 1139 - DNA, 156 bp, Adenovirus D25
  MISC_FEATURE (1)..(156): D25.orf00038 L2 pX core protein L2 pX
atggcaggcagcggcctgaaccgccgccggcggcgggccatgcgcaggcgcctgagtggcggctttctgcccgcgctcatccccataatcgccgcggccatcggcacgatcccgggcatagcttccgttgcgctgcaggcgtcgcagcgccgttga

SEQ ID NO: 1140 - DNA, 1005 bp, Adenovirus D25
  MISC_FEATURE (1)..(1005): D25.orf00040 L2 pV
atgtcaaagcgcaaaatcaaggaggagatgctccaggtcgtcgccccggagatttacggaccaccccaggcggaccagaaaccccgcaaaatcaagcgggttaaaaaaaaggatgaggtggacgagggggcagtagagtttgtgcgcgagttcgctccgcggcggcgcgtaaattggaaggggcgcagggtgcagcgcgtgttgcggcccggcacggcggtggtgttcacgcccggcgagcggtcctcggtcaggagcaagcgtagctatgacgaggtgtacggcgacgacgacatcctggaccaggcggcggagcgggcgggcgagttcgcctacgggaagcggtcgcgcgaagaggagctgatctcgctgccgctggacgaaagcaaccccacgccgagcctgaagcccgtgaccctgcagcaggtgctgccccaggcggtgctgctgccgagccgcggggtcaagcgcgagggcgagagcatgtacccgaccatgcagatcatggtgccaaagcgccggcgcgtggaggacgtgctggacaccgtgaaaatggatgtggagcccgaggtcaaggtgcgccccatcaagcaggtggcgccgggcctgggcgtgcaaaccgtggacattcagatccccaccgacatggatgtcgacaaaaaaccctcgaccagcatcgaggtgcagaccgacccctggctcccagcctccaccgccaccgcctccacttctaccgccgctacggccaccgagcctcccaggaggcgaagatggggcgccgccagccggctgatgcccaactacgtgttgcatccttccatcatcccgacgccgggctaccgcggcacccggtactacgccagccgcaggcgcccagccagcaaacgccgccgccgcaccgccacccgccgccgtctggcccccgcccgcgtgcgccgcgtgaccacgcgccggggccgctcgctcgttctgcccaccgtgcgctaccaccccagcatcctttaa

SEQ ID NO: 1141 - DNA, 525 bp, Adenovirus D25
  MISC_FEATURE (1)..(525): D25.orf00042 L2 pVII
atgtacggaggagccaagaaacgctcccagcagcaccccgtccgcgtccgcggccactttcgcgctccctggggagcttacaagcgggggcggactcccgctgccgccgtgcgcaccaccgtcgacgacgtcatcgactcggtggtcgccgacgcgcgcaactacacccccgccccctccaccgtggacgcggtcatcgacagcgtggtggccgacgcgcgcgactatgccagacgcaagagccggcggcgacggatcgccaggcgccacaggagcacgcccgccatgcgcgccgcccgagctctgctgcgccgcgccagacgcacgggccgccgggccatgatgcgagccgcgcgccgcgccgccactgcaccccccgcaggcaggactcgcagacgagcggccgccgccgccgccgcggccatctctagcatgaccagacccaggcgcggaaacgtgtactgggtgcgcgactccgtcacgggcgtgcgcgtgcccgtgcgcacccgtcctcctcgtccctga

SEQ ID NO: 1142 - DNA, 1512 bp, Adenovirus D25; identical to SEQ ID NO: 183
  MISC_FEATURE (1)..(1512): D25.orf00044 L2 penton

SEQ ID NO: 1143 - DNA, 1596 bp, Adenovirus D25
  MISC_FEATURE (1)..(1596): D25.orf00047 L1 pIIIa
atgcaacgcatcatggccctgacgacccgcaaccccgagtcctttagacaacagccgcaggccaacagactctcggccattctggaggcggtggtcccctctcggaccaaccccacgcacgagaaggtgctggcgatcgtgaacgcgctggcggagaacaaggccatccgtcccgacgaggccgggctggtgtacaacgccctgctggagcgcgtgggccgctacaacagcacgaacgtgcagtccaacctggaccggctggtgacggacgtgcgcgaggccgtggcgcagcgcgagcggttcaagaacgagggcctgggctcgctggtggcgctgaacgccttcctggcgacgcagccggcgaacgtgccgcgcgggcaggacgattacaccaactttatcagcgcgctgcggctgatggtgaccgaggttccccagagcgaggtgtaccagtcgggcccggactactttttccagacgagccggcagggcctgcagacggtgaacctgagccaggctttcaagaacctgcgcgggctgtggggcgtgcaggcgcccgtgggcgaccggtcgacggtgagcagcttgctgacgcccaactcgcgactgctgctgctgctgatcgcgcccttcaccgacagcggcagcgtgaaccgcaactcgtacctgggccacctgctgacgctgtaccgcgaggccataggccaggcgcaggtggacgagcagaccttccaggagatcacgagcgtgagccgcgcgctggggcagaacgacaccgacagtctgagggccaccctgaactttttgctgaccaatagacagcagaagatcccggcgcagtacgcactgtcggccgaggaggaaaggatcctgagatatgtgcagcagagcgtagggctatttctgatgcaggagggtgccacccccagtgccgcgctggacatgaccgcgcgcaacatggaacctagcatgtacgctgccaaccggccgttcatcaataagctgatggactacctgcaccgcgcggcggccatgaacacggactactttaccaacgccatattgaacccgcactggctcccgccgccggggttctacacgggcgagtacgacatgcccgaccccaacgacgggttcctgtgggacgacgtggacagcgcggtgttctcgccggcctttcaaaagcgccaggaggcgccgccgagcgagggcgcggtgggccgcagcccatttcctagcttagggagtttgcatagcttgccgggctcggtgaacagcggcagggtgagccggccgcgcttgctgggcgaggacgagtacctgaacgactcgctgctgcagccgccgcgggtcaagaacgccatggccaataacgggatagagagtctggtggacaaactgaaccgctggaagacctacgctcaggaccatagggacgcgcccgcgccgcggcgacagcgccacgaccggcagcggggcctggtgtgggacgacgaggactcggccgacgatagcagcgtgttggacttgggcgggagcggtggggccaacccgttcgcgcatctgcagcccaaactggggcggcggatgttttga

SEQ ID NO: 1144 - DNA, 957 bp, Adenovirus D25
  MISC_FEATURE (1)..(957): D25.orf00049 L1 52 kDa protein
gtgcagctgcagaaggacgtgcgcccggcgtacgtgcctacgcagaacctgttcagggaccgcagcggggaggagcccgaggagatgcgcgactgccggtttcgggcgggcagggagctgcgcgagggcctggaccgccagcgcgtgctgcgcgacgaggatttcgagccgaacgagcagacggggatcagccccgcacgcgcgcacgtggcggcagccaacctggtgacggcctacgagcagacggtgaagcaggagcgcaacttccaaaagagtttcaacaaccacgtgcgcacgctgatcgcgcgcgaggaggtggccctgggcctgatgcacctgtgggacctggcggaggccatcgtgcagaacccggacagcaagcctctgacggcgcagctgttcctggtggtgcagcacagcagggacaacgaggcgttcagggaggcgctgctgaacatcgccgagcccgagggtcgctggctgctggagctgatcaacatcttgcagagcatcgtagtgcaggagcgcagcttgagcctggccgagaaggtggcggcgatcaactactcggtgttgagcctgggcaagttttacgcgcgcaagatttacaagacgccgtacgtgcccatagacaaggaggtgaagatagacagcttttacatgcgcatggcgctcaaggtgctgacgctgagcgacgaccttggcgtgtaccgcaacgaccgcatccacaaggccgtgagcacgagccggcggcgcgagctgagcgaccgcgagctgatgctgagtctgcgccgggcgctggtagggggcgccgccggcggcgaggagtcctacttcgacatgggtgcggacctgcattggcagccgagccggcgcgccttggaggccgcctacggttcagaggacttggatgaggaagaggaagaggaggaggatgcacccgctgcggggtactga

SEQ ID NO: 1145 - DNA, 363 bp, Adenovirus D25
  MISC_FEATURE (1)..(363): D25.orf00050 L1 52 kDa protein
atgtcgctccggggacggcgcccccagtcttgccagcccttcgccctcttccaagtccatctctgtctgtggtggctggctagcgccggcgcctgctacggccgcggtcgcggtggtcgccgggggggtgggacgcatttggcgcaggacgggatgcatctggcaaaaagaaaaaagggggctcgctcccgtaactggagaagtcggctggctgtgggtctttatatcggcggggtgaccaagtcccgctcgccgcggccgtcctcgaaccgggttctgccgcgactcaaccctggcgatgcttctccagactacgggcgcgagccactacccggcggggttttcgaccgctttcaagtctag

SEQ ID NO: 1146 - DNA, 1854 bp, Adenovirus D25
  MISC_FEATURE (1)..(1854): D25.orf00052 pTP
atggactatttcctgccgctgcgcaacatctggaaccgcgtccgcgagttcccgcgcgcctccaccaccgccgccggcatcacctggatgtcccgctacctctacggctaccaccgcctcatgctcgaggacctggccccgggcgcgccggccacccagcgctggccgctctaccgccagccgccgccgcacttcctagtcggataccagtacctcgtgcgcacctgcaacgactacgtcttcgactcgcgcgccttctcgcggctcaggtactccgaggtcgtgcagcccggcctgcagaccgtcaactggtcgctcatggccaactgcacctacaccatcaacaccggggcctatcaccgcttcgtcgacatggacgacttccaggacaccctcacccgcgtgcaacaggccatcctcgccgagcgcgtcgtcgccgacctggcgctcgtacagccgctcaggggcgtcggggtcacccgcatggaagactccgcctcagccagtgatgacattgagaggctcatgcatgactactacaagaacctgagccggtgtcagggccaggcctggggcatggccgagcggctccgcatccagcaagctggacccaaggacctggtcctcctcgccaccatccgccgcctcaaaaacgcctacttcaattacatcatcagcaaccgcaattctaacagcgtccgcagggctgctacgtgtttgagcttaccttgcgactgcgattggctagacgctttcctcgaaagattctccgatccggtcgatctcgacgcgctcacgtcccctacaccgcaattgataagatgcatcgtcagcgccctatcgctgcccaatggggacccgccccattaccgggagatgaccggcggcgtcttcacgctgcgtcctcgcgaacggggtcgcgccgtcaccgaaaccatgcgtcgccgccgcggggagatgatcgagcgcttcgtcgaccgtctcccggtgcgtcgccgtcgtcgtcggcccccgccaccaccaccgcccccagaggaagaaatagaagaagaggtcgtcatggaagaagaggaagaggaggaggcccccggggatttcgagcgcgaggtgcgcgccaccatcgccgaactcatccggctcctggaagacgagctcacggtctcggcccgcaacgcccagtttttcaacttcgccgtggacttctacgaggccatggaaaggctggaagccatcggcgacatcagcgagatgcccctgcgccgctggatcatgtacttcttcgtcaccgagcacatcgccaccaccctcaactacctcttccagcgcctgcgcaactacgccgtctttgcgcggcacgtggagctcaacctcgcgcaggtggtcatgcgcgcgcgcgacgccgacggggacgtggtctacagccgcgtctggaacgagagcggcctgggcgccttctcgcagctcatgggtcgcatctcgaatgacctcgccgccaccgtcgagcgcgcgggccgcggcgatctccaggaggaggagatcgagcagttcatgtccgagatcgcctaccaggacaactcgggcgacgtgcaagagatcctgcgtcaggccgccgtcaatgacgccgaaattgattctgttgaactgtctttcaggttcaaagtcacggggccagtggtcttcacgcagaggcggcagatccaggatgtcaaccgccgcgtcgtcgcgcacgccagcgctctcagggcgcagcaccgggacctgcccgagcgccacgccgacgtgcctctgccgcccctgcccgcggggccggaaccgccgctgccgccgggagcgcgtccgcgacaccgcttctaa

SEQ ID NO: 1147 - DNA, 3300 bp, Adenovirus D25
  MISC_FEATURE (1)..(3300): D25.orf00055 E2B DNA polymerase
gtggccccgcgcagctacgggctcatgcaatgcgtggacacgaccaccaactcacccgtagaaatcaagtaccatctgcatctcaagcacgccctcacccgcctctacgaggtcaacctcagaaccctgcccccggacctggatctccgcgacaccatggacagctcccaactgcgcgccctcgtcttcgctctccgcccccgccgcgccgatatctggacctggctcccgcgcgggctcgtcagcctctccgtcctcgaggagccccagggtgagtcccacgcaggcgaacatgaaaaccaccagccagggccgccactcctgaagttcctcctcaagggacgcgctgtgtatctcgtggatgaggtacagcccgtgcagcgctgcgagtactgcggacgcttttacaagcatcagcacgagtgctcggttcgccggcgggatttctactttcatcacatcaacagccactcgtccaactggtggcaggaaatccagttcttcccaatcggctctcatcctcgcacggagcggctctttgtcacctacgatgtagaaacctacacctggatggggtccttcggcaagcagctcgtccccttcatgctggtcatgaaattctccggggaccccgagctggtcgccctcgctcgcgatctcgccgtgcgcttacgctgggatcgctgggagcgggaccccctcaccttctactgcgtcaccccagaaaagatggccgtgggccagcagttccgcctctttcgcgacgagctccagaccctcatggcccgcgagctctgggcttccttcatgcaagccaacccacatctccaggagtgggcgctcgagcagcacggcctgcaatgccccgaggacctcacctacgaggagctcaaaaagctgccgcacatcaaaggccgcccgcgattcatggaactctacatcgtcgggcacaacatcaacggcttcgacgagatcgtcctcgccgcccaggtcatcaacaaccgagcctccgtcccgggccctttccgcatcacccgcaatttcatgccgcgggcaggcaagattctcttcaatgacgtcactttcgctctgcctaaccccctctcaaagaagcgcaccgatttcgagctctgggagcacggcggctgcgacgactcggatttcaagtaccagttcttgaaagtcatggtcagggacacctttgccctgacgcacacctcgctccgcaaggccgctcaagcttacgccctccccgtggagaagggctgctgtccctacaaggccgtgaaccatttctacatgctgggctcttaccgtgcggacgatcgaggattcccgctccgggagtactggaaggatgacgaggaatacgccctcaaccgcgagctgtgggagaagaaaggagaggcgagttatgacatcatccgcgaaacgctggactactgcgccatggacgtcctcgtcaccgccgagctcgtcgccaagctgcaagactcctacgcgcacttcatccgcgactcggtccgcctgccccacgcccactttaacatcttccaacgacccaccatctcctccaactcgcatgccatctttcgccagatcgtcttccgcgccgagcagccgcagcgcaccaatctcggccccgccttcttggccccctcgcacgagttgtatgactacgtgcgcgccagcatccgcggggggcgctgctatcccacctacatcggcatcctctcggagcccatctatgtctatgacatctgcggcatgtacgcctccgccctcacgcatcccatgccttggggtccgcccctcaacccctacgagcgagcgctggccgcccgcgagtggcagatggccttggacgatgcatcctcaaaaatcgattattttgacaaggaactctgtccgggcatcttcaccatcgatgcggacccccctgacgagcatctgcttgatgtgctgcccccgttctgctcgcgcaagggcggcagactctgctggaccaacgagcccctgcgcggcgaggtggccaccagcgtggacctggtcaccctgcataaccgcggctggcgcgtcaggatcgtgcccgacgagcgcaccaccgtcttccccgaatggaagtgtgtcgcgcgcgaatatgtccagctcaacatcgcggccaaggagcgcgccgaccgtgacaaaaatcagaccatgagatccatcgccaagcttctctcaaacgccctctatggctccttcgccaccaagcttgacaataaaaaaatagtcttttctgaccagatggatgaaagtctcctaaaaagcatcgcggcagggcaggccaacatcaaatcctcctcgtttctagaaactgacaacctgagtgccgaggtcatgcccgctcttgagagggaatacctaccccaacagctggcgctcgtggacagcgacgcggaagagagtgaggacgagcacagacccgcccccttttatacccccccgtctgggacccccggtcacgtggcctacacctacaagccaatcaccttcttggatgcggaggagggggacatgtgtctgcacacggtggaaaaggtggaccccctggtggacaacgaccgctacccctcgcacgtggcctcctttgtcttggcgtggacgcgcgccttcgtctcagagtggtctgagtttctctacgaggaggaccgcgggacgcccctgcaggacaggcccatcaagtccgtctacggggacacagacagcctgtttgtcaccgagcgcggacacagactcatggagacgcgaggtaagaagcgcatcaaaaagaacgggggaaaactggtttttgaccccgagcagcccgagctcacctggctagtcgagtgcgagaccgtctgcgcccactgcggagcggacgccttcgcccccgagtccgtctttcttgcgcccaagctctacgccctgcaatccctcctctgtcccgcctgcgggcgctcttccaagggcaagctccgcgccaagggccacgccgccgaggccctcaactacgagctcatggtcaactgctatctcgccgacgcgcagggcgaagaccgtgcccgtttcagcaccagcaggatgagtctcaagcgcacccttgcaagcgcccaacccggggcccaccccttcaccgtgacggagaccaccctcacgcggaccctgagaccctggaaggacatgacgctggccgcgctggacgcccatcgtctcgtgccctacagtcgcagtcgtcccaacccccgaaacgaggaagtctgctggatcgagatgccgtag

SEQ ID NO: 1148 - DNA, 1047 bp, Adenovirus D25
  MISC_FEATURE (1)..(1047): D25.orf00056 pIVa2 protein
atgcccatggccgacgggctcaagcccctgaaaaactttgcttccctgcaagagcttctctcgctgggcggggaccgcctcctcggcgagctcgtccgggaaaacctccaagtcagagacatgctcaacgaggtggcccccctcctccgggacgacggcagctgcatgtccttgaactaccacctgcaacccgtcatcggggtcatctacggcccgaccgggtgcggcaagtcccagctgttgagaaacctgctctcctcgcagctcatcacccccgccccggaaaccgtttttttcatcgccccgcaggtggacatgatccccccctccgagatgaaagcctgggagatgcagatctgcgaggggaacttcgccccggggcccgagggaaccatcgtcccccaatctggcaccctccgccccaaattcattaaaatgtcttatgatgatctcacccaggagcataattacgatgtctctgaccccagaaacgtctttgccaaagccgcagcccacgggcccattgccatcatcatggatgagtgcatggaaaacctgggcgggcacaagggcgtctccaaattcttccacgcattcccttccaagttgcatgacaagttccccaagtgcacgggctacaccgttctggtggtcctgcacaacatgaacccccggcgggatctgggtggcaacatcgccaacctcaagatccaggccaaactgcacatcatctccccccgcatgcatccctcccagctcaaccgttttgccaacacctacaccaaggggctccccgtggccatcagtctcctcctcaaggacatcatccagcaccacgcccagcgcccctgctatgactggatcatctacaacacgaccccagagcacgaggccatgcagtggtgctacctccacccccgggacgggctcatgcccatgtacctcaacatccaatcccacctctaccgggtcctggaaaaaatccaccgcactctcaatgatcgggagaggtggaccagggcctaccgcgcgcgaaaaaataaataa

SEQ ID NO: 1149 - DNA, 312 bp, Adenovirus D25
  MISC_FEATURE (1)..(312): D25.orf00059 IX pIX
atgggatcgacggtggatgggcgcccagtgcttccagcaaattcctcgaccatgacctacgcgaccgtggggaactcgtcgctcgacagcaccgccgcagccgcggcagccgcagccgccatgacagcgacgagactggcctcgagctacatgcccagcagcggtagtagcccctctgtgcccagttccatcatcgccgaggagaaactgctggccctgctggccgagctggaagccctgagccgccagctggccgccctgacccagcaggtgtccgagctccgcgaacagcagcagcagcaaaataaatga

SEQ ID NO: 1150 - DNA, 1428 bp, Adenovirus D25
  MISC_FEATURE (1)..(1428): D25.orf00061 E1B 55 kDa protein
gtggagggcctggatcaggcagcggggacagagaatcttgaactactggcttctacagccagcagctccgggtcttcttcgtctacacagacaaacatccatgttggaggaagaaatgaggcaggccatggacgagaacccgaggagcggcctggaccctccgtcggaagaggagctggattgaatcaggtatccagcctgtacccagagcttagcaaggtgctgacatccatggccaggggagtgaagagggagaggagcgatgggggcaataccgggatgatgaccgagctgactgccagcctgatgaatcgcaagcgcccagagcgcattacctggcatgagctacagatggagtgcagggatgagataggcctgatgcaggataaatatggtctggagcagataaaaacccactggttaaacccagatgaggattgggaggaggccattaagaaatatgccaagatagccctgcgcccagattgcaagtacagggtgaccaagacggtgaatatcagacatgcctgctacatctcggggaacggggcagaggtggtcatcgataccctggacaaggccgccttcaggtgttgcatgatgggaatgagagccggagtgatgaatatgaattccatgatcttcatgaacatgaagttcaatggagagaagtttaatggagtgatgttcatggccaacagccacatgaccctgcatggctgtagtttcttcggcttcaacaatatgtgcgcagaggtctggggcgcttccaagatcaggggatgtaagttttatggctgctggatgggcgtggtcggaagacccaagagcgagatgtctgtgaagcagtgtgtgtttgagaaatgctacctgggagtttctaccgagggcaatgctagagtgagacattgctcttccctggagacgggctgcttctgcctggtgaagggtacagcctctctgaagcataatatggtgaagggatgcacggatgagcgcatgtacaacatgctgacctgcgactcgggagtctgtcatatcctgaaaaacatccatgtgacctcccaccccagaaagaagtggccagtgtttgagaataacctgctgatcaagtgccatatgcacctgggcgccagaaggggcaccttccagccgtaccagtgcaactttagtcagaccaagctgctgttggagaacgatgccttctccagggtgaacctgaacggcatctttgacatggatgtctcggtgtacaagatcctgagatacgatgagaccaagtccagggtgcgcgcttgcgagtgcgggggcagacacaccagaatgcaaccagtggccctggatgtgaccgaggagctgagaccagaccacctggtgatggcctgtaccgggaccgagttcagctccagtggggaggatacagattag

SEQ ID NO: 1151 - DNA, 180 bp, Adenovirus D25
  MISC_FEATURE (1)..(180): D25.orf00062 E1B 19k protein
gtgcatggctgcgaagtccaggatgtatcccctgctcagttgggtgtcctggctccatttgtcaaccagaaaaaccacaaaagcaaccccggctgtagtgcgccctggactggaaaaatcaaggctgtggagtaccctttcctggaaaagggactggtggccaagattcagagaatctag

SEQ ID NO: 1152 - DNA, 207 bp, Adenovirus D25
  MISC_FEATURE (1)..(207): D25.orf00064 E1A 14.9 kDa protein
gtgtcagaggatgagtcatcaccctcagaagaagaccacccgtctccccctgatctcacagatgacacgcccctgcaagtgatcagacccaccccagtcagactcagtggggagaggcgaatggctgttgacaaaatcgaggacttgttgcaggacatgggtggggatgaacctttagacctgagcttgaaacgccccaggaactag

SEQ ID NO: 1153 - DNA, 579 bp, Adenovirus D25
  MISC_FEATURE (1)..(579): D25.orf00065 E1A 28 kDa protein
atgagacacctgcgtctcctgcctggaactgtgcccttggacatggccgcattattgctggatgactttgtgagtacagtattggaggatgaactgcaaccaactccgttcgagctggggcccacacttcaggacctctatgatctggaggtagatgcccaggaggacgacccgaacgaagaggctgtgaatttaatatttccagaatctctgattcttcaggctgacatagccagcgaagctgtacctacaccacttcatacaccgactctgtcacccatacctgaattggaagaggaggacgaactagacctccggtgttatgaggaaggttttcctcccagcgattcagaggacgaacggggtgagcagagtatggctataatctcagactatgcttgtgtggttgtggaagagcattttgtgttggacaatcctgaggtgcctgggcaaggctgtagatcctgccaatatcaccgggatcagaccggagaccaaaatgcttcctgtgctctgtgttacatgaaaatgagcttcagctttatttacagtaagtggagtgaatgtgagagaggctga

SEQ ID NO: 1154 - DNA, 378 bp, Adenovirus D26; identical to SEQ ID NO: 1114
  MISC_FEATURE (1)..(378): D26.orf00002 E4 ORF1 protein

SEQ ID NO: 1155 - DNA, 393 bp, Adenovirus D26; identical to SEQ ID NO: 1115
  MISC_FEATURE (1)..(393): D26.orf00003 E4 ORF2 protein

SEQ ID NO: 1156 - DNA, 354 bp, Adenovirus D26; identical to SEQ ID NO: 1116
  MISC_FEATURE (1)..(354): D26.orf00005 E4 ORF3 protein

SEQ ID NO: 1157 - DNA, 363 bp, Adenovirus D26; identical to SEQ ID NO: 1117
  MISC_FEATURE (1)..(363): D26.orf00007 E4 ORF4 protein

SEQ ID NO: 1158 - DNA, 663 bp, Adenovirus D26
  MISC_FEATURE (1)..(663): D26.orf00010 E4 34.1 K E4 ORF6 34.1 kDa protein
atgatcctgaccccagaggaaataaaaattttaaaaagatgtatgtcagtgtgcctgtgccccgctaccctggacttggtgagagctcagatggtgagcgggtacgagcgctggatcctgcattgccactgttcagccccgggatccctgcagtgtcgggcgggaggcaccatgctggccgtgtggttcaggagagtcatttacgggtgcatgttcaaccagcgattcccatggtaccggcagattgtgaacagaaacatgcccaaagagatcatgtatatgggcagtgtgttcatgaggggcaggcacctgatatactgccgcatctggtacgatggtcacgtgggttccatcatccccaacatgagctttggttggagcgccctgaattatgggctgctgaataacatggtgattatgtgctgcacttactgtgagaacatggcagagatcaggatgcggtgctgtgcccgacgcaccaggagactgttgctgaaggctgtggggatcatagtcagagagacttgcgatcccgatcccatctgcagcagccgcaccgagccccggcggcaaagactgttgagggcgctgatggagaggcacagacccatcctgttttccgagtatgaatctgtgcgttcttctcattccaccagactgtga

SEQ ID NO: 1159 - DNA, 246 bp, Adenovirus D26
  MISC_FEATURE (1)..(246): D26.orf00012 E4 ORF6/7 protein
gtgaccttggactgtgaggcccgcttggatgacttttcagaggacggcttcatctcaatcaccgacccccgtttggctcgccaggaaactgtgtggattatagaccccaagtccagttcccgcactaatcagaacatttccctatttaaggccacccgtgctgagagaattgtttacactgtgaaatgggctggtggtgggaaactgactacccgtgctggtgtaaaaataaataaagattcataa

SEQ ID NO: 1160 - DNA, 1125 bp, Adenovirus D26; identical to SEQ ID NO: 154
  MISC_FEATURE (1)..(1125): D26.orf00013 L5 fiber

SEQ ID NO: 1161 - DNA, 150 bp, Adenovirus D26
  MISC_FEATURE (1)..(150): D26.orf00014 U protein
atgaaaattgtggaccaggaatttgacatccctttcaaggtgtggaggaagttcgccgcccgccggggactggagtaccagagctgggaggagggtaccgaggtgctgctgaacaactacaccagagacatactttcagatttcaagtaa

SEQ ID NO: 1162 - DNA, 393 bp, Adenovirus D26
  MISC_FEATURE (1)..(393): D26.orf00018 E3 14.7 kDa protein
atgactgaccaccacctggacctcgagatggacggccaggcctccgagcagcgcatcctgcaactgcgcgtccgtcagcagcaggagcgtgccgccaaggagctcctcgatgccatcaacatccaccagtgcaagaagggcatcttctgcctggtcaaacaggcaaagatcacctacgagctcgtgtccggcggcaagcagcatcgcctcgcctatgagctgccccagcagaagcagaagttcacctgcatggtgggcgtcaaccccatagtcatcacccagcagtcgggcgagaccagcggctgcatccactgctcctgcgaaagccccgagtgcatctactccctgctcaagaccctttgcggactccgcgacctcctccccatgaactga

SEQ ID NO: 1163 - DNA, 393 bp, Adenovirus D26
  MISC_FEATURE (1)..(393): D26.orf00020 E3 RID-beta
atgcagactctgctcatactgctatccctcctatcccctaccctcgccacttctgctgattactctaaatgcaaattcgcggacatatggaatttcttagactgctatcaggagaaaattgacatgccctcctattacttggtgattgtgggaatagttatggtctgctcctgcactttctttgccatcatgatctacccctgttttgatctcggctggaactctgttgaagcattcacatacacactagaaagcagttcactagcctccacgccaccacccacaccgcctccccgcagaaatcagtttcccatgattcagtacttagaagagccccctccccgacccccttccactgttagctactttcacataaccggcggcgatgactga

SEQ ID NO: 1164 - DNA, 276 bp, Adenovirus D26
  MISC_FEATURE (1)..(276): D26.orf00021 E3 RID-alpha
atgattcctaggttcttcctatttaacatcctcttctgtctcttcaacgtgtgcgctgccttcgcggccgtctcgcacgcctcacccgactgtctcgggcccttccccacctacctcctctttgccctgctcacctgcacctgcgtctgcagcattgtctgcctggtcatcaccttcctgcagctcatcgactggtgctgcgcgcgctacaattacctgcatcatagtcccgaatacagggacgagaacgtagccagaatcttaaggctcatatga

SEQ ID NO: 1165 - DNA, 783 bp, Adenovirus D26
  MISC_FEATURE (1)..(783): D26.orf00023 E3 CR1-gamma
atgaaggctttcacagcttgcgttctgattagcatagtcacacttagtgcagctgaagctaaatgctttcatacttataacttaactagaggggaaaatattacattagcaggtgctggcttaaacacaacatgggaagcatatcacaatggatggaaacaagtttgtccatggaatgacggtcgctatgtgtgcgttggaaacagcagtaccataactaatcttacagttgtagctaatgcaaatttatcatcaactgttaaatttagagctgaaagtttatacattggaacagatggatatgaaagcaatccatcatgcttttatactatcaatgtaattgagcttccaaccaccagatcgccaactaccaccacggtcagtacaactactgagaccacaactcacactacacagttagacactacagtgcagaatagtactgtattggttaggtatttgttaagggaggaaagtactactgaacagacagaggctacctcaagcgccttcagcagcacttcaaatttaacttcgcttgcttggactaatgaaaccggagtatcattgatgcatggccagccttactcaggtttggatattcaaattacttttctggttgtctgtgggatctttattcttgtggttcttctgtactttgtctgctgcaaagccagagaaaaatctaggcggcccatctacaggccagtaatcggggaacctcagccactccaagtggatggaggcttaaggaatcttcttttctcttttacagtatggtga

SEQ ID NO: 1166 - DNA, 1254 bp, Adenovirus D26
  MISC_FEATURE (1)..(1254): D26.orf00024 E3 CR1-beta
atgaatgctttgaccagtgtcgtgctgctctctcttcttgtagcttttagtaatggggaagctgaaactgtagttgtaaatgttaaatctggtacaaaccacacccttgaaggtcctagaaaaactccagttcagtggtatgggggtgctaactttgacatgttttgcaatggctctaaaatacatcacaatgaattgaatcacacttgctctattcagaacataactcttacattcataaacagaacacatcatggaacatactatggttttggctctgacaatcaaaattcaaaagtgtatcatgtcagagtagatgtagagcctcctagaccccgtgctactttggctcctcctcaggacataactattaagtatggctcaaatagaacattgcagggcccaagtgttactccagttagttggtatgatggtgaaggaaatcggttttgcgatggcgataaaattgatcatacagaaattaatcacacttgcaatgctcaaaaccttactttgctgtttgtgaatgaaacacatgaaagaacatattatggaattagtggtgattggaaacagcgaaatgagtatgatgttactgttacaaagacacaattaaatattaaaaatttgggccaacgcaaaactgatgaaaaccataaaaatggaatgcatcagaaagtcgaacaaaatcctgaaactaagaaagaacagaagccttcaaaaagacctagacaaaaaacattgcaaactacaattcaggttatgattcctattggaactaattatactttagtggggccttcgccaccagtgagctggcatactacaaaaaatggcttaacagaactctgtaatggaaaccctattttaagacacacttgtgatgggcaaaatattacacttattaatgttaatgctacatttgaggctgattactatggctcgaacaataagagtgaatcaaaacactacagagtcaaggttttcaaagaaagaaaagatcaggcactattattcagaccgcttactaccaaaggaagcatgatcattactactgaaaatcaaaactttgaattacaacaaggtgacaatcaagatgatgacaaaattccatcaactactgtggcaatcgtggtgggtgtgattgcgggctttgtgactctgatcattgtcttcatatgctacatctgctgccgcaagcgtcccaggtcatacaatcatatggtagacccactactcagcttctcttactga

SEQ ID NO: 1167 - DNA, 474 bp, Adenovirus D26
  MISC_FEATURE (1)..(474): D26.orf00025 E3 gp 17.6 kDa protein
atgaaggggcttttgctgattatccttttcatggtggggggtgtactgtcatgccacgaacagccacgatgtaacatcaccacaggcaatcatatgagcagagagtgcactgtagtcatcaaatgcgagcacgactgcccactaaacattacattcaagaataacaccatgggaaatgtatgggtgggtttctgggaaccaggagatgagcagaactacacggtcactgtccatggtagcaatggaaatcacactttcggtttcaaattcatttttgaagtcatgtgtgatatcacactgcatgtggctagacttcatggcttgtggccccctaccaaggagaacatggttgggttttctttggcttttgtgatcatggcctgcttgatgtcaggtctgctggtaggggctttagtgtggttcctgaagcgcaagcctaggtacggaaatgaagaaaaggaaaaattgctataa

SEQ ID NO: 1168 - DNA, 561 bp, Adenovirus D26
  MISC_FEATURE (1)..(561): D26.orf00026 E3 21.8 K E3 21.8 kDa protein
gtgagtttaataaaagctaaactcttgcaatactctggaccttgtcgtcgtcaactcaacgagaccgtctacctcaccaaccagactgaggtaaaactcacctgcagaccacacaagacctatatcatctggttcttcgagaacacctcatttgcagtctccaacactcactgcaacgacggtgttgaacttcccaacaacctttccagtggactgagttacgatacacatagagctaagctcgtcctctacaatccttttgtagagggaacctaccagtgccagagcggaccttgtactcacaccttccatttggtgaacgtcaccagcagcagcaacagctcagaaactaaccttccttctgatactaacaaacctcgtttcggaggtgagctaaggcttcccccttctgaggagggggttagcccatacgaagtggtcgggtatttgattttaggggtggtcctgggtgggtgcatagcggtgctagctcagctgccttgctgggtggaaatcaaaatctttatatgctgggtcagatattgtggggaggaaccatga

SEQ ID NO: 1169 - DNA, 321 bp, Adenovirus D26
  MISC_FEATURE (1)..(321): D26.orf00027 E3 12.2 K E3 12.2 kDa protein
atgtcccatggtgactcggctgagctcgctcggttgaggcatctggaccactgccgccgcctgcgctgcttcgcccgggagagctgcggactcatctactttgagtttcccgaggagcaccccaacggccctgcacacggagtgcggatcaccgtagagggcaccaccgagtctcacctggtcaggttcttcacccagcaacccttcctggtcgagcgggaccggggcgccaccacctacaccgtctactgcatctgtccaaccccgaagttgcatgagaatttttgttgtactctttgtggtgagtttaataaaagctaa

SEQ ID NO: 1170 - DNA, 684 bp, Adenovirus D26
  MISC_FEATURE (1)..(684): D26.orf00029 L4 pVIII L4 pVIII protein
atgagcaaggagattcccaccccttacatgtggagctatcagccccaaatgggcctggccgcgggcgcctcccaggactactccacccgcatgaactggctcagtgccggcccctcgatgatctcacgggtcaacggggtccgcagtcatcgaaaccagatattgttggagcaggcggcggtcacctccacgcccagggcaaagctcaacccgcgtaattggccctccaccctggtgtatcaggaaatccccgggccgactaccgtactacttccgcgtgacgcactggccgaagtccgcatgactaactcaggtgtccagctggccggcggcgcttcccggtgcccgctccgcccacaatcgggtataaaaaccctggtgatccgaggcagaggcacacagctcaacgacgagttggtgagctcttcgatcggtctgcgaccggacggagtgttccaactagccggagccgggagatcctccttcactcccaaccaggcctacctgaccttgcagagcagctcttcggagcctcgctccggaggcatcggaaccctccagtttgtggaggagtttgtgccctcggtctacttcaaccccttctcgggatcgccaggcctctacccggacgagttcataccgaacttcgacgcagtgagagaagcggtggacggctacgactga

SEQ ID NO: 1171 - DNA, 219 bp, Adenovirus D26; identical to SEQ ID NO: 912
  MISC_FEATURE (1)..(219): D26.orf00030 L4 20 kDa protein

SEQ ID NO: 1172 - DNA, 186 bp, Adenovirus D26
  MISC_FEATURE (1)..(186): D26.orf00033 L4 22 kDa protein
gtgaagggtgacggtaagcacgagcggcagggctaccgatcatggagggcccacaaagccgcgatcatcgcctgcttgcaagactgcggggggaacatcgctttcgcccgccgctacctgctcttccaccgcggggtaaacatcccccgcaacgtgttgcattactaccgtcaccttcacagctaa

SEQ ID NO: 1173 - DNA, 2199 bp, Adenovirus D26
  MISC_FEATURE (1)..(2199): D26.orf00035 L4 100 kDa protein
atggaggagcagccgcgtaagcaggagcaggaggaggacttaaccacccacgagcaacccaaaatcgagcaggacctgggcttcgaagagccggctcgtctagaacccccacaggatgaacaggagcacgagcaagacgcaggccaggaggagaccgacgctgggctcgagcatggctacctgggaggagaggaggatgtgctgctgaaacacctgcagcgccagtccctcatcctccgggacgccctggccgaccggagcgaaacccccctcagcgtcgaggagctgtgtcgggcctacgagctcaacctcttctcgccgcgcgtaccccccaaacgccagcccaacggcacctgcgagcccaacccgcgtctcaacttctatcccgtctttgcggtccccgaagccctcgccacctatcacatctttttcaagaaccaaaagatccccgtctcctgccgcgccaaccgcaccagcgccgacgcgctcctcgctctggggcccggcgcgcgcatacctgatatcgcttccctggaagaggtgcccaagatcttcgaagggctcggtcgggacgagacgcgcgcggcgaacgctctgaaagaaacagcagaggaagagggtcacactagcgccctggtagagttggaaggcgacaacgccaggctggccgtgctcaagcgcagcgtcgagctcacccacttcgcctaccccgccgtcaacctcccgcccaaggtcatgcgtcgcatcatggatcagctcatcatgccccacatcgaggccctcgatgaaagtcaggagcagcgccccgaggacgcccggcccgtggtcagcgacgagatgctcgcgcgctggctcgggacccacgacccccaggctttggaacagcggcgcaagctcatgctggccgtggtcctggttaccctcgagctggaatgcatgcgccgcttcttcagcgaccccgagaccctgcgcaaggtcgaggagaccctgcactacactttcagacacggtttcgtcaggcaggcctgcaagatctccaacgtggagctgaccaacctggtctcctgcctggggatcctgcacgagaaccgcctggggcagaccgtgctccactctaccctgaagggcgaggcgcggcgggactatgtccgcgactgcgtctttctatttctttgccacacatggcaagcagccatgggcgtgtggcaacagtgtctcgaggacgataacctgaaggagctggacaagcttcttgctagaaatcttaaaaagctgtggacgggcttcgacgagcgcaccgtcgcctcggacctggccgagatcgtgttccccgagcgcctgaggcagacgctgaaaggcgggctgcccgacttcatgagccagagcatgttgcaaaactaccgcactttcattctcgagcgatctgggatgctgcccgccacctgcaacgctttcccctccgactttgtcccgctgagctaccgcgagtgtcccccgccgctgtggagccactgctacctcttgcagctggccaactacatcgcctaccactcggacgtgatcgaggacgtgagcggcgaggggctgctcgagtgccactgccgctgcaacctgtgctccccgcaccgctccctggtctgcaacccccagctactaagcgagacccaggtcatcggtacctttgagctgcaaggtccgcaggagtccaccgctccgctgaaactcacgccggggttgtggacttccgcgtacctgcgcaaatttgtacccgaggactaccacgcccacgagataaagttcttcgaggaccaatcgcgtccgcagcacgcggatctcacggcctgcgtcatcacccagggcgcaatcctcgcccaattgcacgccatccaaaaatcccgccaagagtttcttctgaaaaagggtagaggggtctacctggacccccagacgggcgaagtgctcaacccgggtctcccccagcatgccgaggaagaagcaggagccgctagtggaggagatggaagaagaatgggacagccaggcagaggaggacgaatgggaggaggagacagaggaggaagaattggaagaggtggaagaggagcaggcaacagagcagcccgtcgccgcaccatccgcgccggcagccccgccggtcacggatacaacctccgcagctccggccaagcctcctcgtag

SEQ ID NO: 1174 - DNA, 1470 bp, Adenovirus D26
  MISC_FEATURE (1)..(1470): D26.orf00036 E2A DNA-binding protein
atggccggcggcagtcaggacgtgcgccggttcatgggccgagaggccactccgccccggggccacgggtcggcgcgctatccgccggagcaggagaggagcccctcgccgccacctcctctgcccaccaagcgccgaaagtatcagcgggtgggctccgggtcttccgaggaggacgtgctccccgtggacagccctccaaaaaagaagcaagccagaaagaccaagcatgtgaccaaggtagaccccgacgaagagatgccccaggaagatgccgtgatcgtgggagtgggattcagccagccgccggttctattgaaggaaggcaaggacggaaaacgcatcgtcgagcccgcgacccccggtgtcctgaacgtacgcaaccctctgagtctgcctctggtctcgtcctgggagaagggcatggataccatgaacgtgctgatggaacgctaccgcgtcgacagcggcctgcgcgatgcttacaagctcatgcccgagcagaccgagatcttccagaagatgtgccagacctggatgaacgaggaggcccgcgggatgcaactgaccttcaccacccagaaagcatttagcaccatcatgggccgcatgttgcaaggttacatcttcagccacagcgggattgcgcacaagaactgggagtgcaccggttgcgccctgtgggatcacggctgcaccgaggtggaaggccagctcaagtgtctgcacgggacgatgatgatccacaaggaccacgtggtggagatggatgtgaccagcgagaacgggcagcgcgcgttgaaggagcagcccagcaaggctaaggtgacccagaaccgctggggacggagcgtggtgcaactgaccagccatgacgcgcgctgctgcgtgcaggatgccgggtgtgggaataaccagttcagcgggaagagctgcggcctgtttttcagcgagggggccaaggcccagcaagctttcaagcagatcgcggcctttgtcaaggccctctacccgaatatgcagcgcggcgcggggatgatgctgatgcccgtgcactgcgagtgtaaccacaagcctcagagcgtgcccttcctgggacgccagctgtgcaagatgaccccgttcggcctgagcaacgccgaggatctggacaaggatcagatcagcgacaagagcgtgctggctagtgtgaagtaccccagtctgatggtgttccagtgctgcaaccccgtgtaccgcaactcgcgcgcgcagagcaccggccccaactgcgatttcaagatctccgccccggacatgctgggcgccctgcagatgagccggcgcatgtggagcgagaccttccccgagaccccagtgcccaaactggtgatccccgagttcaagtggcagcccaagtaccagtaccgcaacgtggccctccccagcgcggcgcacaacgacgagcgcgagaaccccttcgacttttaa

SEQ ID NO: 1175 - DNA, 630 bp, Adenovirus D26
  MISC_FEATURE (1)..(630): D26.orf00038 L3 23.6 kDa protease
atgagcggctccagcgaacgagagctcgcggccatcgtgcgcgacctgggctgcgggccctactttttgggcacccacgacaagcgcttcccgggctttctcgccggcgacaagctggcctgcgccatcgtcaacacggccggccgcgagaccggaggcgtgcactggctcgccttcggctggaacccgcgctcgcgcacctgctacatgttcgacccctttgggttctcggaccgccggctcaagcagatttacagcttcgagtacgaggccatgctgcgccgcagcgccctggcctcctcgcccgaccgctgtctcagcctcgagcagtccactcagaccgtgcaggggcccgactccgccgcctgcggactcttctgttgcatgttcttgcatgccttcgtgcactggcccgaccgacccatggacggaaaccccaccatgaacttgctgacgggggtgcccaacggcatgctacaatcgccacaggtgctgcccaccctcaggcgcaaccaggaggaactctaccgcttcctcgcgcgccactccccttactttcgctcccaccgcgccgccatcgaacacgccaccgcttttgacaaaatgaaacaactgcgtgtatctcaataa

SEQ ID NO: 1176 - DNA, 2889 bp, Adenovirus D26; identical to SEQ ID NO: 214
  MISC_FEATURE (1)..(2889): D26.orf00041 L3 hexon

SEQ ID NO: 1177 - DNA, 705 bp, Adenovirus D26
  MISC_FEATURE (1)..(705): D26.orf00042 L3 pVI
atggaagacatcaattttgcgtccctggctccgcggcacggcacgcggccgttcatgggcacctggaacgagatcggcaccagccagctgaacgggggcgccttcaattggagcagtgtctggagcgggcttaaaaatttcggctcgacgctccggacctatgggaacaaggcctggaatagtagcacggggcagttgttgagggaaaagctcaaagaccagaacttccagcagaaggtggtggacgggctggcctcgggcattaacggggtggtggacatcgcgaaccaggccgtgcagcgcgagataaacagccgcctggacccgcggccgcccacggtggtggagatggaagatgcaactcttccgccgcccaaaggcgaaaagcggccgcggcccgacgcggaggagacgatcctgcaggtggacgagccgccctcgtacgaggaggccgtcaaggccggcatgcccaccacgcgcatcatcgcgccgctggccacgggtgtaatgaaacccgccacccttgacctgcctccaccacccgcgcccgctccaccgaaggcaactccggttgtgcaggcccccccggtggcgaccgccgtgcgccgcgtccccgcccgccgccaggcccagaactggcagagcacgctgcacagtatcgtgggcctgggagtgaaaagtctgaagcgccgccgatgctattga

SEQ ID NO: 1178 - DNA, 1005 bp, Adenovirus D26; identical to SEQ ID NO: 956
  MISC_FEATURE (1)..(1005): D26.orf00044 L2 pV

SEQ ID NO: 1179 - DNA, 588 bp, Adenovirus D26
  MISC_FEATURE (1)..(588): D26.orf00045 L2 pVII
atgtctattctcatctcgcccagcaataacaccggctggggtcttactagacccagcaccatgtacggaggagccaagaagcgctcccagcagcaccccgtccgcgtccgcggccacttccgcgctccctggggcgcttacaagcgcgggcggacttccaccgccgccgtgcgcaccaccgtcgacgacgtcatcgactcggtggtcgccgacgcgcgcaactacactcccgccccctccaccgtggacgcggtcatcgacagcgtggtggccgacgcgcgcgactatgccagacgcaagagccggcggcgacggatcgccaggcgccaccggagcacgcccgccatgcgcgccgcccgggctctgctgcgccgcgccagacgcacgggccgccgggccatgatgcgagccgcgcgccgcgctgccactgcacccacccccgcaggcaggactcgcagacgagcggccgccgccgccgctgcggccatctctagcatgaccagacccaggcgcggaaacgtgtactgggtgcgcgactccgtcacgggcgtgcgcgtgcccgtgcgcacccgtcctcctcgtccctga

SEQ ID NO: 1180 - DNA, 1560 bp, Adenovirus D26; identical to SEQ ID NO: 184
  MISC_FEATURE (1)..(1560): D26.orf00046 L2-pIII penton

SEQ ID NO: 1181 - DNA, 1596 bp, Adenovirus D26
  MISC_FEATURE (1)..(1596): D26.orf00050 L1 pIIIa
atgcaacgcatcatggccctgacgacccgcaaccccgagtcctttagacaacagccgcaggccaacagactctcggccattctggaggcggtggtcccctctcggaccaaccccacgcacgagaaggtgctggcgatcgtgaacgcgctggcggagaacaaggccatccgtcccgacgaggccgggctggtgtacaacgccctgctggagcgcgtgggccgctacaacagcacgaacgtgcagtccaacctggatcggctggtgacggacgtgcgcgaggccgtggcgcagcgcgagcggttcaagaacgagggcctgggctcgctggtggcgctgaacgccttcctggcgacgcagccggcgaacgtgccgcgcgggcaggacgattacaccaactttatcagcgcgctgcggctgatggtgaccgaggtgccccagagcgaggtgtaccagtctggcccggactactttttccagacgagccggcagggcttgcagacggtgaacctgagccaggctttcaagaatctgcgcgggctgtggggcgtgcaggcgcccgtgggcgaccggtcgacggtgagcagcttgctgacgcccaactcgcggctgctgctgctgctgatcgcgcccttcaccgacagcggcagcgtgaaccgcaactcgtacctgggccacctgctgacgctgtaccgcgaggccataggccaggcgcaggtggacgagcagaccttccaggagatcactagcgtgagccgcgcgctggggcagaacgacaccgacagtctgagggccaccctgaactttttgctgaccaatagacagcagaagatcccggcgcagtacgcactgtcggccgaggaggaaaggattctgagatatgtgcagcagagcgtagggctgttcctgatgcaggagggtgccacccccagcgccgcgctggacatgaccgcgcgcaacatggaacctagcatgtacgccgccaaccggccgttcatcaataagctgatggactacttgcaccgcgcggcggccatgaacacggactactttaccaacgccatcctgaacccgcactggctcccgccgccggggttctacacgggcgagtacgacatgcccgaccccaacgacgggttcctgtgggacgacgtggacagcgcggtgttctcgccgacctttcaaaagcgccaggaggcgccgccgagcgagggcgcggtggggaggagcccctttcctagcttagggagtttgcatagcttgccgggctcggtgaacagcggcagggtgagccggccgcgcttgctgggcgaggacgagtacctgaacgactcgctgctgcagccgccgcgggccaagaacgccatggccaataacgggatagagagtctggtggacaaactgaaccgctggaagacctacgctcaggaccatagggacgcgcccgcgccgcggcgacagcgccacgaccggcagcggggcctggtgtgggacgacgaggactcggccgacgatagcagcgtgttggacttgggcgggagcggtggggtcaacccgttcgcgcatctgcagcccaaactggggcgacggatgttttga

SEQ ID NO: 1182 - DNA, 1122 bp, Adenovirus D26
  MISC_FEATURE (1)..(1122): D26.orf00051 L1 52 kDa protein
atgcatcccgtcctgcgccaaatgcgtcccacccccccggcgaccaccgcgaccgcggccgtagcaggcgccggcgctagccagccaccacagacagagatggacttggaagagggcgaagggctggcaagactgggggcgccgtccccggagcgacatccccgcgtgcagctgcagaaggacgtgcgcccggcgtacgtgcctacgcagaacctgttcagggaccgcagcggggaggagcccgaggagatgcgcgactgccggtttcgggcgggcagggagctgcgcgagggcctggaccgccagcgcgtgctgcgcgacgaggatttcgagccgaacgagcagacggggatcagccccgcacgcgcgcacgtggcggcagccaacctggtgacggcctacgagcagacggtgaagcaggagcgcaacttccaaaagagtttcaacaaccacgtgcgcacgctgatcgcgcgcgaggaggtggccctgggcctgatgcacctgtgggacctggcggaggccatcgtgcagaacccggacagcaagcctctgacggcgcagctgttcctggtggtgcagcacagcagggacaacgaggcgttcagggaggcgctgctgaacatcgccgagcccgagggtcgctggctgctggagctgattaacatcttgcagagcatcgtagtgcaggagcgcagcctgagcctggccgagaaggtggcggcgatcaactactcggtgctgagcctgggcaagttttacgcgcgcaagatttacaagacgccgtacgtgcccatagacaaggaggtgaagatagacagcttttacatgcgcatggcgctcaaggtgctgacgctgagcgacgacctgggcgtgtaccgcaacgaccgcatccacaaggccgtgagcacgagccggcggcgcgagctgagcgaccgcgagctgatgctgagtctgcgccgggcgctggtagggggcgccgccggcggcgaggagtcctacttcgacatgggtgcggacctgcattggcagccgagccggcgcgccttggaggccgcctacggttcagaggacttggatgaggaagaggaagaggaggaggatgcacccgctgcggggtactga

SEQ ID NO: 1183 - DNA, 210 bp, Artificial Sequence
  D26.orf00052 hypothetical protein
atgcatctggcaaaaagaaaaaagggggctcgctcccgtaactggagaagtcggctggctgtgggtctttatatcggcggggtgaccaagtcccgctcgccgcggccgtcctcgaaccgggttctgccgcgactcaaccctggcgatgcttctccagactacgggcgcgagccactacccggcagggttttcggtcgctttcaagtctag

SEQ ID NO: 1184 - DNA, 1854 bp, Adenovirus D26
  MISC_FEATURE (1)..(1854): D26.orf00055 pTP
atggactatttcctgccgctgcgcaacatctggaaccgcgtccgcgagttcccgcgcgcctccaccaccgccgccggcatcacctggatgtcccgctacctctacggctaccaccgcctcatgctcgaggacctggccccgggcgcgccggccacccagcgctggccgctctaccgccagccgccgccgcacttcctagtcggataccagtacctcgtgcgcacctgcaacgactacgtcttcgactcgcgcgccttctcgcggctcaggtactccgaggtcgtgcagccaggcctgcagaccgtcaactggtcgctcatggccaactgcacctacaccatcaacaccggggcctatcaccgcttcgtcgacatggacgacttccaggacaccctcacccgcgtgcaacaggccatcctcgccgagcgcgtcgtcgccgacctggcgctcgtgcagccgctcaggggcgtcggggtcacccgcatggaagactccgcctcagccagtgatgacattgagaggctcatgcatgactactacaagaacctgagccggtgtcagggccaggcctggggcatggccgagcggctccgcatccagcaagctggacccaaggacctggtcctcctcgccaccatccgccgcctcaaaaacgcctacttcaattacatcatcagcaaccgcaattctaacagcgtccgcagggctgctacgtgtttgagcttaccttgcgactgcgattggctagacgctttcctcgaaagattctccgatccggtcgatctcgacgcgctcacgtcccctacaccgcaattgataagatgcatcgtcagcgccctatcgctgcccaatggggacccgccccattaccgggagatgaccggcggcgtcttcacgctgcgtcctcgcgaacggggtcgcgccgtcaccgaaaccatgcgtcgccgccgcggggagatgatcgagcgcttcgtcgaccgtctcccggtgcgtcgccgtcgtcgtcggcccccgccaccaccaccgcccccagaggaagaaatagaagaagaggtcgtcatggaagaagaggaagaggaggaggcccccggggatttcgagcgcgaggtgcgcgccaccatcgccgaactcatccggctcctggaagacgagctcacggtctcggcccgcaacgcccagtttttcaacttcgccgtggacttctacgaggccatggaaaggctggaagccatcggcgacatcagcgagatgcccctgcgccgctggatcatgtacttcttcgtcaccgagcacatcgccaccaccctcaactacctcttccagcgcctgcgcaactacgccgtctttgcgcggcacgtggagctcaacctcgcgcaggtggtcatgcgcgcgcgcgacgccgacggggacgtggtctacagccgcgtctggaacgagagcggcctgggcgccttctcgcagctcatgggtcgcatctccaatgacctcgccgccaccgtggagcgcgcgggccgcggcgatctccaggaggaggagatcgaacagttcatgtccgagatcgcctaccaggacaactcgggcgacgtgcaagagatcctgcgtcaggccgccgtcaatgacgcagagattgattctgttgaactgtctttcaggttcaaagtcacggggcccgtggtcttcacgcagaggcggcagatccaggatgtcaaccgccgcgtcgtcgcgcacgccagcgctctcagggcgcagcaccgggacctgcccgagcgccacgccgacgtgcctctgccgcccctgcccgcggggccggaaccgccgctgccgccgggagcgcgtccgcgacaccgcttctaa

SEQ ID NO: 1185 - DNA, 3276 bp, Adenovirus D26
  MISC_FEATURE (1)..(3276): D26.orf00059 E2B DNA polymerase
atgcaatgcgtggacacgaccaccaactcacccgtagaaatcaagtaccatctgcatctcaagcacgccctcacccgcctctacgaggtcaacctcagaaccctgcccccggacctggatctccgcgacaccatggacagctcccaactgcgcgccctcgtcttcgctctccgcccccgccgcgccgagatctggacctggctcccgcgcgggctcgtcagcctctccgtcctcgaggagccccagggtgagtcccacgcaggcgaacatgaaaaccaccagccagggccgccactcctgaagttcctcctcaagggacgcgctgtgtatctcgtggatgaggtacagcccgtgcagcgctgcgagtactgcggacgcttttacaagcatcagcacgagtgctcggttcgccggcgggatttctactttcatcacatcaacagccactcgtccaactggtggcaggaaatccagttcttcccaatcggctctcatcctcgcacggagcggctctttgtcacctacgatgtagaaacctacacctggatggggtccttcggcaagcagctcgtccccttcatgctggtcatgaaattctccggggacccagagctggtcgccctcgctcgcgatctcgccgtgcgtttacgctgggatcgctgggagcgggaccccctcaccttctactgcgtcaccccagaaaagatggccgtgggccagcagttccgcctctttcgcgacgagctccagaccctcatggcccgcgagctctgggcttccttcatgcaagccaacccacatctccaggagtgggcgctcgagcagcacggcctgcaatgccccgaggacctcacctacgaggagctcaaaaagctgccgcacatcaaaggccgcccgcgattcatggaactctacatcgtcgggcacaacatcaacggctttgacgagatcgtcctcgccgcccaggtcatcaacaaccgagcctccgtcccgggccctttccgcatcacccgcaatttcatgccgcgggcaggcaagattctcttcaatgacgtcactttcgctctgcctaaccccctctcgaagaagcgcaccgatttcgagctctgggagcacggcggctgcgacgactcggacttcaagtaccagttcttgaaagtcatggtcagggacacctttgccctgacgcacacctcgctccgcaaggccgctcaagcttacgccctccccgtggagaagggctgctgtccctacaaggccgtgaaccatttctacatgctgggctcttaccgtgcggacgatcgaggattcccgctccgggagtactggaaggatgacgaggaatacgccctcaaccgcgagctgtgggagaagaaaggagaggcgagttatgacatcatccgcgaaacgctggactactgcgccatggacgtcctcgtcaccgccgagctcgtcgccaagctgcaagactcctacgcgcacttcatccgcgactcggtccgcctgcctcacgcccactttaacatcttccaacggcccaccatctcctccaactcgcacgccatctttcgccagatcgtcttccgcgccgagcagccccagcgcaccaatctcggccccgccttcttggccccctcgcacgagttgtatgactacgtgcgcgcaagcatccgcggggggcgctgctatcccacctacatcggcatcctctcggagcccatctatgtctatgacatctgcggcatgtacgcctccgccctcacgcatcccatgccttggggtccgcccctcaacccctacgagcgagcgctggccgcccgcgagtggcagatggccttggacgatgcatcctcaaaaatcgattattttgacaaggaactctgtccgggcatcttcaccatcgatgcggacccccctgacgagcatctgcttgatgtgctgcccccgttctgctcgcgcaagggcggcagactctgctggaccaacgagcccctgcgcggcgaggtggccaccagcgtggacctggtcaccctgcataaccgcggctggcgcgtcaggatcgtgcccgacgagcgcaccaccgtcttccccgaatggaagtgtgtcgcgcgcgaatatgtccagctcaacatcgcggccaaggagcgcgccgaccgtgacaaaaatcagaccatgagatccatcgccaagcttctctcaaacgccctctatggctccttcgccaccaagcttgacaataaaaaaatagtcttttctgaccagatggatgaaagtctcctaaaaagcatcgcggcagggcaggcccacatcaaatcctcctcgtttctagaaactgacaacctgagtgccgaggtcatgcccgctcttgagagggaatacctaccccaacagctggcgctcgtggacagcgacgcggaagagagtgaggacgagcacagacccgcccccttttatacccccccgtcgggaaccccaggtcacgtggcctacacctacaagccaatcaccttcttggatgcggaggagggggacatgtgcctgcataccgtggaaaaggtggaccccctggtggacaacgaccgctacccctcgcacgtggcctcctttgtcttggcgtggacgcgcgccttcgtctcagagtggtctgagtttctctacgaggaggaccgcgggacgcccctgcaggacaggcccatcaagtccgtctacggggacacagacagcctgtttgtcaccgagcgcggacacagactcatggagacgcgaggtaagaagcgcatcaaaaagaacgggggaaaactggtttttgaccccgagcagcccgagctcacctggctagtcgagtgcgagaccgtctgcgcccactgcggagcggacgccttcgcccccgagtccgtctttctcgcgcccaagctctacgccctgcaatccctcctctgtcccgcctgcgggcgctcttccaagggcaagctccgcgccaagggccacgccgccgaggccctcaactacgagctcatggtcaactgctatctcgccgacgcgcagggcgaagaccgtgcccgtttcagcaccagcaggatgagtctcaagcgcacccttgcaagcgcccagcccgcggcccaccccttcaccgtgacggagaccaccctcacgcggaccctgagaccctggaaggacatgacgctggccgcgctggacgcccatcgtctcgtgccctacagtcgcagtcgtcccaacccccgaaacgaggaagtctgctggatcgagatgccgtag

SEQ ID NO: 1186 - DNA, 1047 bp, Adenovirus D26
  MISC_FEATURE (1)..(1047): D26.orf00060 pIVa2 protein
atgcccatggccgacgggctcaagcccctgaaaaactttgcttccctgcaagagcttctctcgctgggcggggaccgcctcctcggcgagctcgtccgggaaaacctccaagtcagagacaagctcaacgaggtggcccccctcctccgggacgacggcagctgcatgtccttgaactaccacctgcaacccgtcatcggggtcatctacggcccgaccgggtgcggcaagtcccagctgttgagaaacctgctctcctcgcagctcatcacccccgccccggaaaccgtttttttcatcgccccgcaggtggacatgatccccccctccgagatgaaagcctgggagatgcagatctgcgaggggaacttcgccccggggcccgagggaaccatcgtcccccaatctggcaccctccgccccaaattcattaaaatgtcttatgatgatctcacccaggagcataattacgatgtctctgaccccagaaacgtctttgccaaagccgcagcccacgggcccattgccatcatcatggatgagtgcatggaaaacctgggcgggcacaagggcgtctccaaattcttccacgcattcccttccaagttgcatgacaagttccccaagtgcacgggctacaccgttctggtggtcctgcacaacatgaacccccggcgggatctgggtggcaacatcgccaacctcaagatccaggccaaactgcacatcatctccccccgcatgcatccctcccagctcaaccgttttgccaacacctacaccaaggggctccccgtggccatcagtctcctcctcaaggacatcatccagcaccacgcccagcgcccctgctatgactggatcatctacaacacgaccccagagcacgaggccatgcagtggtgctacctccacccacgggacgggctcatgcccatgtacctcaacatccaatcccacctctaccgggtcctggaaaaaatccaccgcactctcaatgatcgggagaggtggaccagggcctaccgcgcgcgaaaaaataaataa

SEQ ID NO: 1187 - DNA, 405 bp, Adenovirus D26
  MISC_FEATURE (1)..(405): D26.orf00063 IX pIX
atgaacgggactggcggggccttcgaaggggggctttttagcccttatttgacaacccgcctgccgggatgggccggagttcgtcagaatgtgatgggatcgacggtggatgggcgcccagtgcttccagcaaattcctcgaccatgacctacgcgaccgtggggaactcgtcgctcgacagcaccgccgcagccgcggcagccgcagccgccatgacagcgacgagactggcctcgagctacatgcccagcagcggtagtagcccctctgtgcccagttccatcatcgccgaggagaaactgctggccctgctggccgagctggaagccctgagccgccagctggccgccctgacccagcaggtgtccgagctccgcgaacagcagcagcagcaaaataaatga

SEQ ID NO: 1188 - DNA, 1488 bp, Adenovirus D26
  MISC_FEATURE (1)..(1488): D26.orf00065 E1B 55k E1B 55k protein
atggagccaggacacccaactgagcaggggctacatcctggacttcgcagccatgcacctgtggagggcctggatcaggcagcggggacagagaatcttgaattactggcttctacagccagcagctccgggtcttcttcgtctacacagacaaacatccatgttggaggaagaaatgaggcaggccatggacgagaacccgaggagcggcctggaccctccgtcggaagaggagctggattgaatcaggtatccagcctgtacccagagcttagcaaggtgctgacatccatggccaggggagttaagagggagaggagcgatgggggtaataccgggatgatgaccgagctgacggccagcctgatgaatcggaagcgcccagagcgccttacctggtacgagctacagcaggagtgcagggatgagttgggcctgatgcaggataaatatggcctggagcagataaaaacccattggttgaacccagatgaggattgggaggaggctattaagaagtatgccaagatagccctgcgcccagattgcaagtacatagtgaccaagaccgtgaatatcagacatgcctgctacatctcggggaacggggcagaggtggtcatcgataccctggacaaggccgccttcaggtgttgcatgatgggaatgagagcaggagtgatgaatatgaattccatgatcttcatgaacatgaagttcaatggagagaagtttaatggggtgctgttcatggccaacagccacatgaccctgcatggctgcagtttcttcggcttcaacaatatgtgcgcagaggtctggggcgcttccaagatcaggggatgtaagttttatggctgctggatgggcgtggtcggaagacccaagagcgagatgtctgtgaagcagtgtgtgtttgagaaatgctacctgggagtctctaccgagggcaatgctagagtgagacactgctcttccctggagacgggctgcttctgcctggtgaagggcacagcctctctgaagcataatatggtgaagggctgcacggatgagcgcatgtacaacatgctgacctgcgattcgggggtctgccatatcctgaagaacatccatgtgacctcccaccccagaaagaagtggccagtgtttgagaataacctgctgatcaagtgccatatgcacctgggagccagaaggggcaccttccagccgtaccagtgcaactttagccagaccaagctgctgttggagaacgatgccttctccagggtgaacctgaacggcatctttgacatggatgtctcggtgtacaagatcctgagatacgatgagaccaagtccagggtgcgcgcttgcgagtgcgggggcagacacaccaggatgcagccagtggccctggatgtgaccgaggagctgagaccagaccacctggtgatggcctgtaccgggaccgagttcagctccagtggggaggatacagattag

SEQ ID NO: 1189 - DNA, 207 bp, Adenovirus D26; identical to SEQ ID NO: 966
  MISC_FEATURE (1)..(207): D26.orf00068 E1A 14.8 kDa protein

SEQ ID NO: 1190 - DNA, 519 bp, Adenovirus D26
  MISC_FEATURE (1)..(519): D26.orf00070 E1A 28 kDa protein
atgctggaggactttgtggatacagtattggaggacgaactgcatccaagtccgttcgagctgggacccacacttcaggatctctatgatctggaggtagatgcccatgatgacgaccctaacgaggaggctgtgaatttaatatttccagaatctatgattcttcaggctgacatagccaacgaatctactccacttcatacaccgactctgtcacccatacctgaattggaagaggaggacgaactagacctccggtgttatgaggaaggttttcctcccagcgattcagaggatgaacggggtgagcagaccatggctctgatctcagactatgcttgtgtgattgtggaggaacaagtagtgattgaaaattctaccgagccagtggagggctgtagaaaatgccagtaccaccgggataagtctggagacccgaacgcatcatgcgctttgtgctatatgaaacagactttcagctttatttacagtaagtggagtgaatgtgagagaggctga

SEQ ID NO: 1191 - DNA, 126 bp, Artificial Sequence; identical to SEQ ID NO: 932
  D26.orf00071 hypothetical protein

SEQ ID NO: 1192 - DNA, 378 bp, Adenovirus D27
  MISC_FEATURE (1)..(378): D27.orf00003 E4 ORF1 protein
atggctgaatctctgtatgctttcatagatagccctggagggatcgctcccgtccaggaagggactagcaatagatataatttcttttgccccgaatctttccacattcctccgcatggggtggttttggttcacttgagagtgagcgtgctgattcctaatggctaccaaggcagatttatggccttgaatgactaccattccaggggcatactaacccagtccgatgtgatctttgctgggagaagacaggagctaactgtgctgctctttaaccacacggatcgatttttgtatgtccgagagggccacccagtgggcactttgctgctggagagagtgatttttccttcagtaagacttgccactctggtttag

SEQ ID NO: 1193 - DNA, 393 bp, Adenovirus D27
  MISC_FEATURE (1)..(393): D27.orf00004 E4 ORF2 protein
atgcttgagcgacgcgctgtcagctaccacattgtggtccctggggccctagtgacttatttagaggatttttccattactgctatgattagagagcacctacctcgctttatcactcaccttttggaaggaatcaccggtgacacaaagagagcttattccagcgtgcagtttttgggtgctagctttggagcattaaagtactccatcacgcttgccagtcccacgcttagccctggctctgaattggcatctgtagtggccgaggacttgagtgactttttacagctgacgctgagacgcgagctcagggcagagggcagaaactcattgaatcttgttgttttgaacacgctgcaggtggtggagcagccagatttgttgctattatga

SEQ ID NO: 1194 - DNA, 354 bp, Adenovirus D27
  MISC_FEATURE (1)..(354): D27.orf00006 E4 ORF3 protein
atgaaggtctgcctgattatgaaagtggagggggcgctgtgggaacttttccacatgtgcggagtggacttacaccaacaatttgtagaaataattcaaggctggaaaaatgagaattacctgggaatggtgaatgagtgtaacctgatgattgatgaaatcgatggagggccagcctttaatgtgattcttatgctggatgtacgcgtagagccactgctcgaagccacagtcgagcaccttgaaaatagagtaggttttgacctggctgtctgtttccaccagcacagcggcggggaacgctgtcacctgcgtgacttgcactttatcgtccttcgagaccgcttggaataa

SEQ ID NO: 1195 - DNA, 879 bp, Adenovirus D27
  MISC_FEATURE (1)..(879): D27.orf00011 E4 34 kDa protein
atgcaaaccgaggatcagtcgagcttgctccgccatcatccatatcgcagggcccgtttaccacgatctgatgaggagaccagggcctctctgactgaacaacaccctctgttgcccgattgtgatcatgcagattatcataatgtaagttctgtccgtggattgccatgtgctgctggctttaccctgctccaagagtttccagtcccctgggatatgatcctgtccccagaggaaataaaaattttaaaaagatgtatgtcagtgtgcctgtgccccgctaccctggacttggtaagagctcagatggtgagcgggtacgagcgctggatcctgcattgccactgttcatccccgggctccctgcagtgtcgggcgggaggcaccctgctggccgtgtggttcaggagagtcatttacgggtgcatgttcaaccagcgattcccctggtaccggcagattgtgaacagaaacatgcccaaagagatcatgtatatgggcagtgtgttcatgaggggcaggcacctgatatactgccgcatctggtatgatggtcacgtgggttccatcatccccaacatgagctttggctggagcaccctgaattatgggctgctgaataacatggtgattatgtgctgcacttactgtgagaacatgagcgagatcaggatgcggtgctgtgcccgacgcaccaggagactgatgctgaaggctgtggggatcatagtcagagagacttgcgatcccgatcccatctgcagcagccgcaccgagccccggcggcaaagactgttgagggcgctgatggagaggcacagacccatcctgttttccgagtatgaatctgtgcgttcttctcattccaccagactgtga

SEQ ID NO: 1196 - DNA, 246 bp, Adenovirus D27
  MISC_FEATURE (1)..(246): D27.orf00012 E4 ORF6/7 protein
gtgaccttggactgcgaggcccgcttggatgacttttcagaggacggcttcatctcaatcaccgacccccgtttggctcgccaggaaactgtgtggattatagaccccaagttcagttcccgcactaatcagaacattcccctatttaaggccacccgtgctgagagaattgtttacactgtgaaatgggctggtggtgggagactgactacccgtgctggtgtaaaaatcaataaagatacatga

SEQ ID NO: 1197 - DNA, 1104 bp, Adenovirus D27; identical to SEQ ID NO: 155
  MISC_FEATURE (1)..(1104): D27.orf00014 L5 fiber

SEQ ID NO: 1198 - DNA, 150 bp, Adenovirus D27
  MISC_FEATURE (1)..(150): D27.orf00015 U protein
atgaaaattgtggaccaggaatttgacatccctttcaaggtgtggaggaagtttgccgcccgccggggactggagtatcagagctgggaggagggtactgaggtgctgctgaacaactacaccagagacatactttcagatttcaagtaa

SEQ ID NO: 1199 - DNA, 393 bp, Adenovirus D27
  MISC_FEATURE (1)..(393): D27.orf00016 E3 14.7 kDa protein
atgactgacaaccacctggacctcgagatggacggccaggcctccgagcagcgcatcctgcaactgcgcgtccgtcagcagcaggagcgggccgccaaggagctcctcgatgccatcaacatccaccagtgcaagaagggcatcttctgcctggtcaaacaggcaaagatcacctacgagctcgtgtccggcggcaagcagcatcgcctcgcctatgagctgccccagcagaagcagaagttcacctgcatggtgggcatcaaccccatagtcatcacccagcagtcgggcgagaccaacggctgcatccactgctcctgcgaaagccccgagtgcatctactccctgctcaagaccctttgcggactacgcgacctcctccccatgaactga

SEQ ID NO: 1200 - DNA, 387 bp, Adenovirus D27
  MISC_FEATURE (1)..(387): D27.orf00018 E3 RID-beta
atgcagactctgctcatactgctatccctcctataccctgcccttgctgatgattactctaagtgcaaattcgcggacatatggaatttcttagactgctatgatgctaaaatggatatgccttcctattacttggtaattgtggggatagtcatggtctgctcctgcactttctttgccatcatgatctacccctgttttgatcttggctggaactctgttgaggcattcacatacacactagaaagcagttcactagcctccacaccaccacccacaccgcctccccgcagaaatcagtttcccatgattcagtacttagaagagccccctccccggcccccttccactgttagctactttcacataaccggcggcgatgactga

SEQ ID NO: 1201 - DNA, 276 bp, Adenovirus D27
  MISC_FEATURE (1)..(276): D27.orf00019 E3 RID-alpha
atgattcctaggttcttcctatttaacatcctcttctgtctcttcaacatctgtgctgccttcgcggccgtctcgcacgcatcgcccgactgtctcgggcccttcccaacctacctcctctttgccctgctaacctgcacctgcgtctgcagcattgtctgcctggtcatcaccttcctgcagctcatcgactggtgctgcgcgcgctacaattacctacaccacagtcccgaatacagggacgagaacgtagccagaatcttaaggctcatctga

SEQ ID NO: 1202 - DNA, 861 bp, Adenovirus D27
  MISC_FEATURE (1)..(861): D27.orf00021 E3 CR1-gamma
atgaaggctttcacagcttgcgttctgattagcctagtcacacttagtttagccaaaattaatcaaatcagtgtcaaaagaggtgaaaatgttacactagatggaacttatccaaatactacatggacaagatatcaccttacaaaatgggataatatttgcaaatggaatatttcaacatataaatgtcataataatggaagcattacaattcatacttttaatatcacttctggattatacaagggagatagctataaaagagaagtgattacatcaatgtctagatttggaaatatgacagacacttatttcagcgaatatcaacaattaaaaatgtataatttaacaataattgaaccaccaactactaaagcacccactaccactaagcctaccacagttaagacaacacaacctaccactgtgcccactacacatcaaaccaccgcagtcagtacaactattgaaaccactactcacactacacagctagacactacagtgcagaatagtactgtgttggttaggtatctgttgagggaggaaagtactactgaacagacagaggctacctcaagtgccttcagcagcactgcaaatttaacttcgcttgcttcaataaatgagaccctcgtgccgatgaaacaggatcaacctaattactcaggtttggatatgcaaattactttcttaattgtctgtggagtctttattcttgtggttcttctttactttgtcttttgcaaagccagacaaaaatctcatagaacaatctacaggccagtgattggggaacctcagcccctccaagtggacggaggcttaaggaatcttctcttctcttttacagtatggtga

SEQ ID NO: 1203 - DNA, 1266 bp, Adenovirus D27
  MISC_FEATURE (1)..(1266): D27.orf00022 E3 CR1-beta
atgaatactttgaccagtgtcgtgctgctctctcttcttgtagcttttagtcagggacaagctgtgcatgtgaaacttgaaatttgttatggttgtaatggtacactaataggaccacataaaactccagttgagtggtatgacggcagaggacacaaactttgtgcaggatctgatacttttcacaaggaactaaatcacacatgtgatttacaaaatatgacacttacatttgttaacttaactcataagggtacttactatggttttggcagtgataacaaaaactctaaagtataccaggttactattaagccacctgttctgacaactcgcaggcctttattaaaacctgaagatattgtaatcactaagggaagcaacaaaactcttgtgggtcctccagatacaccagttgactggtatgatggttcaggacataaattgtgtaaaggaaaagaagttcattaccctgaactcaatcacacctgtgatgagcagaaccttacactcatatttgtaaatgccacttttaagggaacctattatggctttagaaaagatggcacagacaaaaaggaatatagagtcaaaattgatgatttatatgcaaaacaactaaaacaggaaaaagatgaaaaaccaaggtctggccatgataagcagaaatcaaaaacagaagaaaaacaaaatccaaaaacagaagaaaggcatgggcatagagatgttgttaaagaagttagctttagaactggaactaatcaaactctagtgggcccaccagggtctaaggttgattggcttaaagttggaaatggtgggacatttagcgaactttgtaaaagcgataataaacactattcttgtaattctcaaaacttaacaataatcaatgttaccagatttgatgaaggtagctattatggctctaatgacggttcagctcattacagagtttcagtctacgacccagtacagaaaaaaagggttatgaaaatacaaccacacacaacaaaaactactgcaaaaaaaactacaaaaagcagcactaatgaaacagatgaaaactttgctttgcaacagggtaacaatggggaaaatcaatatgatgaaactaatattccttcaactactgtggcaatcgtggtgggagtgattgcgggcttcataactataatcattgtcattctgtgctacatctgctgccgcaagcgtcccagggcatacaatcatatggtagacccactactcagcttctcttactga

SEQ ID NO: 1204 - DNA, 252 bp, Adenovirus D27
  MISC_FEATURE (1)..(252): D27.orf00024 E3 gp 17.6 kDa protein
atgcagtgtgatatcacacatgacttcaaaaatgaatttgaaaccgaaagtgtgtttgccatcgctaccatggacagtgaccgtgtagttctgctcatctcctggttgccagaagcccacccatacatttcccatggtcttattcttgaatgtaatgttgagagaacatttgtgctcacatttgataactacagagcattcgcttctctcattgcctgtggtgatgttacatcgtggctgttcgtggcatga

SEQ ID NO: 1205 - DNA, 192 bp, Adenovirus D27
  MISC_FEATURE (1)..(192): D27.orf00025 E3 gp 17.6 kDa protein
atgtgtgatatcacactgcatgtggctagacttcatggcttgtggccccctaccaaggagaacatggtgggtttttctttggcttttgtgatcatggcctgcttgatgtcaggtctgctggtaggggctttagtgtggttcctgaagcgcaagcctaggtatggaaatgaggagaaggaaaaattgctataa

SEQ ID NO: 1206 - DNA, 567 bp, Adenovirus D27
  MISC_FEATURE (1)..(567): D27.orf00026 E3 CR1-alpha
gtgagtttaataaaagctgaactaagaacctactttggaatcccttgtcgtcatcctcggaacaagaccgtcttctttaccaaccagaccaaggttcgtctgaactgcacaaccaacaggaagtaccttctctggacttttcaagacacctcactcgctgttgtcaatacccgtgacaacgacggtgttttaatccccaacaacctcaccagtggacttactttctctaccaacaaaacaaagctcatccttcaccacccttttgtagagggaacctaccagtgccgacacggaccttgtgttcacaacttccatttggtgaaccttaccagcagcagcacagttgctcctgaaagtaacctttcttctgatactaacaaacctcgtgtcggaggtgagctttgggttccatctctaacagagggtgggagttctattgaagtggttgggtatttgattttaggggtggtccttggtgggtgcatagcagtgctgtatcaacttccttgctgggtcgaaatcagggtatttatctgctgggtcagacattgtggggaggaaccatga

SEQ ID NO: 1207 - DNA, 321 bp, Adenovirus D27
  MISC_FEATURE (1)..(321): D27.orf00027 E3 12.2 kDa protein
atgtcctatggtgactcggctgagctcgctcggttgaggcatctggaccactgccgccgcctgcgctgcttcgcccgggagagctgtggcctcatctactttgagtttcccgaggagcaccccaacggccctgcacacggagtgcggatcaccgtagagggcaccaccgagtctcacctggtcaggttcttcacccagcaacccttcctggtcgagcgggaccggggcgccaccacctacaccgtctactgcatctgtcctaccccgaagttgcatgagaatttttgctgtactctttgtggtgagtttaataaaagctga

SEQ ID NO: 1208 - DNA, 684 bp, Adenovirus D27
  MISC_FEATURE (1)..(684): D27.orf00029 L4 pVIII
atgagcaaggagattcccaccccttacatgtggagctatcagccccagatgggcctggccgcgggcgcctcccaagactactccacccgcatgaactggctcagtgccggcccctcgatgatatcacgggtcaacggggtccgtaaccatcgaaaccagatattgttggagcaggcggcggtcacctccacgcccagggcaaagctcaacccgcgtaattggccctccaccctggtgtatcaggaaatccccgggccgactaccgtactacttccgcgtgacgcactggccgaagtccgcatgactaactcaggtgtccagctggccggcggcgcttcccggtgcccgctccgcccacaatcgggtataaaaaccctggtgatccgaggcagaggcacacagctcaacgacgagttggtgagctcttcgatcggtctgcgaccggacggagtgttccaactagccggagccgggagatcctccttcactcccaaccaggcctacctgaccttgcagagcagctcttcggagcctcgctccggaggcatcggaaccctccagttcgtggaggagtttgtgccctcggtctacttcaaccccttctcgggatcgccaggcctctacccggacgagttcataccgaacttcgacgcagtgagagaagcggtggacggctacgactga

SEQ ID NO: 1209 - DNA, 219 bp, Adenovirus D27; identical to SEQ ID NO: 912
  MISC_FEATURE (1)..(219): D27.orf00030 L4 20 kDa protein

SEQ ID NO: 1210 - DNA, 186 bp, Adenovirus D27; identical to SEQ ID NO: 949
  MISC_FEATURE (1)..(186): D27.orf00032 L4 22 kDa protein

SEQ ID NO: 1211 - DNA, 2199 bp, Adenovirus D27
  MISC_FEATURE (1)..(2199): D27.orf00034 L4 100 kDa protein
atggaggagcagccgcgtaagcaggagcaggaggaggacttaaccacccacgagcaacccaaaatcgagcaggacctgggcttcgaagagccggctcgtctagaacccccacaggatgaacaggagcacgagcaagacgcaggccaggaggagaccgacgctgggctcgagcatggctacctgggaggagaggaggatgtgctgctcaaacacctgcagcgccagtccctcatcctccgggacgccctggccgaccggagcgaaacccccctcagcgtcgaggagctgtgtcgggcctacgagctcaacctcttctcgccgcgcgtaccccccaaacgccagcccaacggcacatgcgagcccaacccgcgtctcaacttctatcccgtctttgcggtccccgaggccctcgccacctatcacatctttttcaagaaccaaaagatccccgtctcctgccgcgccaaccgcacccgcgccgacgcgctcctcgctctggggcccggcgcgcgcatacctgatatcgcttccctggaagaggtgcccaagatcttcgaagggctcggtcgggacgagacgcgcgcggcgaacgctctgaaagaaacagcagaggaagagggtcacactagcgccctggtagagttggaaggtgacaacgccaggctggccgtgctcaagcgcagcgtcgagctcacccactttgcctaccccgccgtcaacctcccgcccaaggtcatgcgtcgcatcatggatcagctcatcatgccccacatcgaggccctcgatgagacccaagagcagcgccccgaggacgcccggcccgtggtcagcgacgagatgctcgcgcgctggctcgggacccgcgagccccaggctttggaacagcggcgcaagctcatgctggccgtggtcctggtcaccctcgagctcgaatgcatgcgccgcttcttcagcgaccccgagaccctgcgcaaggtcgaggagaccctgcactacactttcagacacggtttcgtcaggcaggcctgcaagatttccaacgtggagctgaccaacctggtctcctgcctggggatcctgcatgagaaccgcctgggacagaccgtgctccactctaccctgaagggcgaggcgcggagggactatgtccgcgactgcgtctttctctttctctgccacacatggcaagcagccatgggcgtgtggcagcagtgtctcgaggacgagaatctgaaggagctggacaagcttcttgctagaaaccttaaaaagctttggacgggcttcgacgagcgcaccgtcgcctcggacctggccgagatcgtcttccccgagcgcctgaggcagacgctgaaaggcgggctgcccgacttcatgagccagagcatgttgcaaaactaccgcactttcattctcgagcgatcggggatgctgcccgccacctgcaacgctttcccctccgactttgtcccgctgagctaccgcgagtgtcccccgccgctgtggagccactgctacctcttgcagctggccaactacatcgcctaccactcggacgtgatcgaggacgtgagcggcgaggggcttctcgagtgccactgccgctgcaacctgtgctccccgcaccgctccctggtctgcaacccccagctccttagcgagacccaggtcatcggtaccttcgagctgcaaggtccgcaggagtccaccgctccgctgaaactcacgccggggttgtggacttccgcgtacctgcgcaaatttgtacccgaggactaccacgcccatgagataaagttcttcgaggaccaatcgcgtccgcagcacgcggatctcacggcctgcgtcatcacccagggcgcgatcctcgcccaattgcacgccatccaaaaatcccgccaagagtttcttctgaaaaagggtagaggggtctacctggacccccagacgggcgaggtgctcaacccgggtctcccccagcatgccgaggaagaagcaggagccgctagtggaggagatggaagaagaatgggacagccaggcagaggaggacgaatgggaggaggagacagaggaggaagaattggaagaggtggaagaggagcaggcaacagagcagcccgtcgccgcaccatccgcgccggcagccccgccggtcacggatacaacctccgcagctccggtcaagcctcctcgtag

SEQ ID NO: 1212 - DNA, 1470 bp, Adenovirus D27
  MISC_FEATURE (1)..(1470): D27.orf00035 E2A DNA-binding protein
atggccggcggcagtcaggacgtgcgccggttcatggaccgagaggccactccgccccggggccacggttcagcgcgctatccgccggagcaggagaggagcccctcgccgccacctcctctgccaaccaagcgccgaaagtatcagcgggtgggatccgggtcttccgaggaggacgtggtccccgtggacagccctccaaaaaagaagcaagccagaaagaccaagcatgtgaccaaggtagacccagacgaagagatgccccaggaagaagccgtgatcgtgggagtgggattcagccagccgccggttctgttgaaggaaggcaaggacggaaaacgcatcgtcgagcccgcgacccccggtgtcctgaacgtgcgcaaccccctgagtctgcctctggtctcgtcctgggagaagggcatggataccatgaacgtgctgatggaacgctaccgcgtcgacagcggcctgcgcgatgcttacaagctcatgcccgagcagaccgagatcttccaaaagatgtgccagacctggatgaacgaggaggcccgcggtctgcaactgaccttcaccacccagaaagcatttagcaccgtcatgggtcgcctgttgcaaggttacattttcagccacagcgggatcgcgcacaagaattgggagtgcaccggctgcgccctgtgggatcacggctgcaccgaggtggaaggccagctcaagtgtctgcatggaacggtgatgatccacaaggaccacgtggtggagatggatgtgaccagtgagaacggacagcgcgcgctgaaggagcaacccagcaaggccaaggtgacccagaaccgctggggacggagcgtggtgcaactgaccagccatgacgcgcgctgctgcgtccatgatgccgggtgcgggaataatcagttcagcgggaagagctgcggcctgtttttcagcgagggggccaaggcccagcaagctttcaagcagatcgcggccttcgtcaaggccctctacccgaatatgcagcgcggcgcggggatgatgctgatgcccgtgcactgcgagtgtaaccacaagcctcagagcgtgcccttcctgggccgccagctgtgcaagatgaccccgttcggcctgagcaacgccgaggacctggacaaggatcagatcagcgacaagagcgtgctggctagtgtgaagtaccccagtctgatggtgttccagtgctgcaacccagtgtaccgcaactcgcgcgcgcagagcaccggccccaactgcgatttcaagatctccgcgcctgacatgctgggcgccctgcagatgagccggcgcatgtggagcgagaccttccccgagaccccagtgcccaaactggtgatccccgagttcaagtggcagcccaagtaccagttccgcaacgtggccctccccagcgcggcgcacaacgacgagcgcgagaaccccttcgacttttaa

SEQ ID NO: 1213 - DNA, 630 bp, Adenovirus D27
  MISC_FEATURE (1)..(630): D27.orf00037 L3 23.6 kDa protease
atgagcggctccagcgaaagagagctcgcggccatcgtgcgcgacctgggctgcgggccctactttttgggtacccacgacaagcgcttcccgggcttccttgccggcgacaagctggcctgcgccatcgtcaacacggccggccgcgagaccgggggcgtgcactggctcgccttcggctggaacccgcgctcgcgcacctgctacatgttcgacccctttgggttctcggaccgccggctcaagcagatttacagcttcgagtacgaggccatgctgcgccgcagcgccctggcctcctcgcccgaccgctgtctcagcctcgagcagtccacccagaccgtgcaggggcccgactccgccgcctgcggacttttctgttgcatgttcttgcatgccttcgtgcactggcccgaccgacccatggacggaaaccccaccatgaacttgctgacgggggtgcccaacggcatgctacaatcgccacaggtgctgcccaccctccggcgcaaccaggaggagctctaccgcttcctcgcgcgccactccccttactttcgctcccaccgcgccgccatcgaacacgccaccgcttttgacaaaatgaaacaactgcgtgtatctcaataa

SEQ ID NO: 1214 - DNA, 2841 bp, Adenovirus D27; identical to SEQ ID NO: 215
  MISC_FEATURE (1)..(2841): D27.orf00039 L3 hexon

SEQ ID NO: 1215 - DNA, 651 bp, Adenovirus D27
  MISC_FEATURE (1)..(651): D27.orf00040 L3 pVI
atgggcacctggaacgagatcggcaccagccagctgaacgggggcgccttcaattggagcagtgtctggagcgggcttaaaaatttcggctcgacgctccggacctatgggaacaaggcctggaatagtagcacggggcagttgttgagggaaaagctcaaagaccagaacttccagcagaaggtggtggacgggctggcctctggcattaacggggtggtggacatcgcgaaccaggccgtgcagcgcgagataaacagccgcctggacccgcgcccgcccacggtggtggagatggaagatgcaactcttccgccgcccaaaggcgagaagcggccgcggcccgacgcggaggagacgatcctgcaggtggacgagccgccctcgtacgaggaggccgtgaaggccggcatgcccaccacgcgcatcatcgcgccgctggccacgggtgtaatgaaacccgccacccttgacctgcctccaccacccacgcccgctccaccaaaggcagctccggttgtgcagccccctcctgtggcgaccgccgtgcgccgcgtccccgcccgccgccaggcccagaactggcagagcacgctgcacagtatcgtgggcctgggagtgaaaagtctgaagcgccgccgatgctattga

SEQ ID NO: 1216 - DNA, 1005 bp, Adenovirus D27
  MISC_FEATURE (1)..(1005): D27.orf00042 L2 pV
atgtcaaagcgcaaaatcaaggaggagatgctccaggtcgtcgccccggagatttacggaccaccccaggcggaccagaaaccccgcaaaatcaagcgggttaaaaaaaaggatgaggtggacgagggggcagtagagtttgtgcgcgagttcgctccgcggcggcgcgtaaattggaaggggcgcagggtgcagcgcgtgttgcggcccggcacggcggtggtgttcacgcccggcgagcggtcctcggtcaggagcaagcgtagctatgacgaggtgtacggcgacgacgacatcctggaccaggcggcggagcgggcgggcgagttcgcctacgggaagcggtcgcgcgaagaggagctgatctcgctgccgctggacgagagcaaccccacgccgagcctgaagcccgtgaccctgcagcaggtgctgccccaggcggtgctgctgccgagccgcggggtcaagcgcgagggcgagagcatgtacccgaccatgcagatcatggtgcccaagcgccggcgcgtggaggacgtgctggacaccgtgaaaatggatgtggagcccgaggtcaaggtgcgccccatcaagcaggtggcgccgggcctgggcgtgcaaaccgtggacattcagatccccaccgacatggatgtcgacaaaaaaccctcgaccagcatagaggtgcagaccgacccctggctcccagcctccaccgctaccgtctccacttctaccgccgccacggctaccgagcctcccaggaggcgaagatggggcgccgccagccggctgatgcccaactacgtgttgcatccttccattatcccaacgcctggctaccgcggcacccggtactacgccagccgcaggcacccagccaccaagcgccgccgccgcaccaccacccgccgccgtctggccccagcccgcgtgcgccgcgtgaccacgcgccggggccgctcgctcgttctgcccaccgtgcgctaccaccccagcatcctttaa

SEQ ID NO: 1217 - DNA, 585 bp, Adenovirus D27
  MISC_FEATURE (1)..(585): D27.orf00043 L2 pVII major core protein L2 pVII
atgtctattctcatctcgcccagcaataacaccggctggggtcttactaggcccagcaccatgtacggaggagccaagaagcgctcccagcagcaccccgtccgcgtccgcggccacttccgcgctccctggggcgcttacaagcgcgggcggacttccaccgccgtgcgcaccaccgtcgacgacgtcatcgactcggtggtcgccgacgcgcgcaactacactcccgccccctccaccgtggacgcggtcatcgacagcgtggtggccgacgcgcgcgactatgccagacgcaagagccggcggcgacggatcgccaggcgccaccggagtacgcccgccatgcgcgccgcccgggctctgctgcgccgcgccagacgcacgggccgccgggccatgatgcgagccgcgcgccgcgctgccactgcacccacccccgcaggcaggactcgcagacgagcggccgccgccgccgctgcggccatctctagcatgaccagacccaggcgcggaaacgtgtactgggtgcgcgactccgtcacgggcgtgcgcgtgcccgtgcgcacccgtcctcctcgtccctga

SEQ ID NO: 1218 - DNA, 1545 bp, Adenovirus D27; identical to SEQ ID NO: 185
  MISC_FEATURE (1)..(1545): D27.orf00044 L2 penton

SEQ ID NO: 1219 - DNA, 1683 bp, Adenovirus D27
  MISC_FEATURE (1)..(1683): D27.orf00047 L1 pIIIa
atgtcccagcaagccccggaccccgccataagggcggcgctgcaaagccagccgtccggtctagcatcggacgactgggaggccgcgatgcaacgcatcatggccctgacgacccgcaaccccgagtcctttagacaacagccgcaggccaacagactctcggccattctggaggcggtggtcccctctcgaaccaaccccacgcacgagaaggtgctggcgatcgtgaacgcgctggcggagaacaaggccatccgtcccgacgaggccgggctggtgtacaacgccctgctggagcgcgtgggccgctacaacagcacgaacgtgcagtccaacctggaccggctggtgacggacgtgcgcgaggccgtggcgcagcgcgagcggttcaagaacgagggcctgggctcgctggtggcgctgaacgccttcctggcgacgcagccggcgaacgtgccgcgcgggcaggacgattacaccaactttatcagcgcgctgcggctgatggtgaccgaggtgccccagagcgaggtgtaccagtcgggcccggactactttttccagacgagccggcagggcttgcagacggtgaacctgagccaggctttcaagaacctgcgcgggctgtggggcgtgcaggcgcccgtgggcgaccggtcgacggtgagcagcttgctgacgcccaactcgcggctgctgctgctgctgatcgcgcccttcaccgacagcggcagcgtgaaccgcaactcgtacctgggccacctgctgacgctgtaccgcgaggccataggccaggcgcaggtggacgagcagaccttccaggagatcacgagcgtgagccgcgcgctggggcagaacgacaccgacagtctgagggccaccctgaacttcttgctgaccaatagacagcagaagatcccggcgcagtacgcactgtcggccgaggaggaaaggatcctgagatatgtgcagcagagcgtagggctgttcctgatgcaggagggcgccacccccagcgccgcgctggacatgaccgcgcgcaacatggaacctagcatgtatgccgccaaccggccgttcatcaataagctgatggactacctgcaccgcgcggcggccatgaacacggactactttaccaacgccatcctgaacccgcactggctcccgccgccggggttctacacgggcgagtacgacatgcccgaccccaacgacgggttcctgtgggacgacgtggacagcgcggtgttctcgccgacttttcaaaagcgccaggaggcgccgccgagcgagggcgcggtggggaggagcccctttcctagcttagggagtttgcatagcttgccgggctcggtgaacagcggcagggtgagccggccgcgcttgctgggcgaggacgagtacctgaacgactcgctgctgcagccgccacgggccaagaacgccatggccaataacgggatagagagtctggtggacaaactgaaccgatggaagacctacgctcaggaccatagggacgcgcctgcgccgcggcgacagcgccacgaccggcaacggggcctggtgtgggacgacgaggactcggccgacgataacagcgtgttggacttgggcgggagcggtggggccaacccgttcgcgcatctgcagcccagactggggaggcggatgttttga

SEQ ID NO: 1220 - DNA, 1119 bp, Adenovirus D27
  MISC_FEATURE (1)..(1119): D27.orf00050 L1 52 kDa protein
atgcatcccgtcctgcgccaaatgcgtcccacccccccggcgaccaccgcgaccgcggccgtagcaggcgccggcgctagccagccacagacagagatggacttggaagagggcgaagggctggcaagactgggggcgccgtccccggagcgacacccccgcgtgcagctgcagaaggacgtgcgcccggcgtacgtgcctgcgcagaacctgttcagggaccgcagcggggaggagcccgaggagatgcgcgactgccggtttcgggcgggcagggagctgcgcgagggcctggaccgccagcgcgtgctgcgcgacgaggatttcgagccgaacgagcagacggggatcagccccgcgcgcgcgcacgtggcggcggccaacctggtgacggcctacgaacagacggtgaagcaggagcgcaacttccaaaagagtttcaacaaccacgtgcgcacgctgatcgcgcgcgaggaggtggccctgggcctgatgcacctgtgggacctggcggaggccatcgtgcagaacccggacagcaagcctctgacggcgcagctgttcctggtggtgcagcacagcagggacaacgaggcgttcagggaggcactgctgaacatcgccgagcccgagggtcgctggctgctggagctgatcaacatcttgcagagcatcgtagtgcaggagcgcagcctgagcctggccgagaaggtggcggcgatcaactactcggtgctgagcctgggcaagttttacgcgcgcaagatttacaagacgccgtacgtgcccatagacaaggaggtgaagatagacagcttttacatgcgcatggcgctcaaggtgctgacgctgagcgacgacctgggcgtgtaccgcaacgaccgcatccacaaggccgtgagcacgagccggcggcgcgagctaagcgaccgcgagctgatgctgagccttcgccgggcgctggtagggggcgccgccggcggcgaggagtcctacttcgacatgggggcggacctgcattggcagccgagccggcgcgccttggaggccgcctacggtccagaggacttggatgaggatgaggaagaggaggaggatgcacccgctgcggggtactga

SEQ ID NO: 1221 - DNA, 1854 bp, Adenovirus D27
  MISC_FEATURE (1)..(1854): D27.orf00052 pTP
atggactatttcctgccgctgcgcaacatctggaaccgcgtccgcgagttcccgcgcgcctccaccaccgccgccggcatcacctggatgtcccgctacctctacggctaccaccgcctcatgctcgaggacctggccccgggcgcgccggccacccagcgctggccgctctaccgccagccgccaccgcacttcctagtcggctaccagtacctcgtgcgcacctgcaacgactacgtcttcgactcgcgcgccttctcgcggatcaggtactccgaggtcgtgcaacccggcctgcagaccgtcaactggtcgctcatggccaactgcacctacaccatcaacaccggggcctaccaccgcttcgtcgacatggatgacttccaggacaccctcacccgcgtgcaacaggccatcctcgccgagcgcgtcgtcgccgacctggcgctcgtgcagccgctcaggggcgtcggggtcacccgcatggaagactccgcctccgccagtgatgacattgagaggctcatgcatgactactacaagaacctgagccggtgtcagggccaggcctggggcatggccgagcggctccgcatccagcaagcgggacccaaggacctggtcctcctcgccaccatccgccgcctcaaaaacgcctacttcaattacatcatcagcaaccgcaattctaacagcgtccacagggctgctacgtgtttgagcttaccttgcgactgcgattggctagacgctttcctcgaaagattctccgatccggtcgatctcgacgcgctcacgtcccctacaccgcaattgataagatgcatcgtcagcgccctatcgctgcccaatggggacccgccccattaccgggagatgaccggcggcgtcttcacgctgcgtcctcgcgaacggggtcgcgccgtcaccgaaaccatgcgtcgccgccgcggggagatgatcgagcgcttcgtcgaccgtctcccggtgcgtcgccgtcgtcgtcgggccccgccaccaccaccgcccccagaggaagaaatagaagaagaggtcgtcatggaagaagaggaagaagaggaggcccccggggatttcgagcgcgaggtgcgcgccaccatcgccgagctcatcaggctcctggaagacgagctcacggtctcggcccgcaatgcccagtttttcaacttcgccgtggatttctacgaggccatggaaaggctggaggccatcggcgacatcagcgagatgcccctgcgccgctggatcatgtacttcttcgtcaccgagcacatcgccaccaccctcaactacctcttccagcgcctgcgcaactacgccgtcttcacgcggcacgtggagctcaacctcgcgcaggtggtcatgcgcgcacgcgacgccgacggggacgtggtctacagccgcgtctggaacgagagcggcctgggcgccttctcgcagctcatgggccgcatctccaatgacctcgccgccaccgtggagcgcgcgggccgcggcgatctccaggaggaggagatcgaacagttcatgtccgagatcgcctaccaggacaactcgggcgacgtgcaagagatcctgcgtcaggccgccgtcaatgacgcagagattgattctgttgaactgtctttcaggttcaaagtcacggggcccgtggtcttcacgcagaggcggcagatccaggatgtcaaccgccgcgtcgtcgcgcacgccagcgctctcagggcgcagcaccgggacctgcccgagcgccacgccgacgtgcctctgccgcccctgcccgcggggccggaaccgccgctgccgccgggagcgcgtccgcgacaccgcttctaa

SEQ ID NO: 1222 - DNA, 3276 bp, Adenovirus D27
  MISC_FEATURE (1)..(3276): D27.orf00055 E2B DNA polymerase
atgcaatgcgtggacacgaccaccaactcacccgtagagatcaagtaccatctgcatctcaagcacgccctcacccgcctctacgaggtcaacctcagaaccctgcccccggacctggatctccgcgacaccatggacagctcccaactgcgcgccctcgtcttcgctctccgcccccgccgcgccgatatctggacctggctcccgcgcgggctcgtcagcctctccgtcctcgaggagccccagggtgagtcccacgcaggcgaacatgaaagccaccagccagggccgccactcctgaagttcctcctcaagggacgcgctgtgtatctcgtggatgaggtacagcccgtgcagcgctgcgagtactgcggacgcttttacaagcatcagcacgagtgctcggttcgccggcgggatttctactttcatcacatcaacagccactcgtccaactggtggcaggaaatccagttcttcccaatcggctctcatcctcgcacggagcggctctttgtcacctacgatgtagaaacctacacctggatggggtccttcggcaagcagctcgtccccttcatgctggtcatgaaattctcgggggaacccgagctggtcgccctcgctcgcgatctcgccgtgcgcttacgctgggatcgctgggagcgggaccccctcaccttctactgcgtcaccccagaaaagatggccgtgggccagcagttccgcctctttcgcgacgagctccagaccctcatggcccgcgagctctgggcttccttcatgcaagccaacccacatctccaggagtgggcgctcgagcagcacggcctgcaatgccccgaggacctcacctacgaggagctcaaaaagctgccgcacatcaaaggccgcccgcgattcatggaactctacatcgtcgggcacaacatcaacggcttcgacgagatcgtccttgccgcccaggtgatcaacaaccgagcctccgtcccgggccctttccgcatcacccgcaatttcatgccgcgggcaggcaagattctcttcaatgacgtcactttcgctctgcctaaccccctctcaaagaagcgcaccgatttcgagctctgggagcacggcggctgcgacgactcggatttcaagtaccagttcttgaaagtcatggtcagggacacctttgccctgacgcacacctcgctccgcaaggccgctcaagcttacgccctccccgtggagaagggctgctgtccctacaaggccgtgaaccatttctacatgctgggctcttaccgtgcggacgatcgaggattcccgctccgggagtactggaaggatgacgaggaatacgccctcaaccgcgagctgtgggagaagaaaggagaggcgagttatgacatcatccgcgaaacgctggactactgcgccatggacgtcctcgtcaccgccgagctcgtcgccaagctgcaagactcctacgcgcacttcatccgcgactcggtccgcctgccccacgcccactttaacatcttccaacggcccaccatctcctccaactcgcatgccatctttcgccagatcgtcttccgcgccgagcagccccagcgcaccaatctcggccccgccttcttggccccctcgcatgagttgtatgactacgtgcgcgccagcatccgcggggggcgctgttatcccacctacatcggcatcctctcggagcccatctatgtctatgacatctgcggcatgtacgcctccgccctcacgcatcccatgccctggggtccgccccttaacccctacgagcgagcgctggccgcccgcgagtggcagatggccttggatgatgcatcctcaaaaatagattattttgacaaggaactctgtccgggcatcttcaccatcgatgcggacccccctgacgagcatctgcttgatgtgctgccaccgttctgctcgcgcaagggcggcagactctgctggaccaacgagcccctgcgcggcgaggtggccaccagcgtggacctggtcaccctgcataaccgcggctggcgcgtcaggatcgtgcccgacgagcgcaccaccgtcttcccggaatggaagtgcgtcgcgcgcgagtatgtccagctcaacatcgcggccaaggagcgcgccgaccgtgacaaaaatcagacaatgagatccatcgccaagcttctctccaacgccctctatggctccttcgccaccaagcttgacaataaaaaaattgtcttttctgaccagatggatgaaagtctcctaaaaagcatcgcggcagggcaggccaacatcaaatcctcctcgtttctagaaactgacaacctgagtgccgaggtcatgcccgctctcgagagggaatacctaccccaacagctggcgctcgtggacagcgacgcggaagagagtgaggacgagcacagacccgcccccttttatacccccccgtcggggacccccggtcacgtggcctacacctacaagccaatcaccttcttggatgcggaggagggggacatgtgtctgcacacggtggaaaaggtggaccccctggtggacaacgaccgctacccctcgcacgtggcctcctttgtcttggcgtggacgcgcgcctttgtctcagagtggtccgagtttctctacgaggaggaccgcgggacgcccctgcaggacaggccaatcaagtccgtctacggggacaccgacagcctgtttgtcaccgagcgcggacacagactcatggagacgcgaggtaagaagcgcatcaaaaagaacgggggaaaactggtttttgaccccgagcagccagagctcacctggctcgtcgagtgcgagaccgtctgcgcccactgcggagcggacgctttcgctcccgagtccgtctttctcgcccccaagctctacgccctgcaatccctcctctgtcccgcctgcgggcgctcttccaagggcaagctccgcgccaagggccacgccgccgaggccctcaactacgagctcatggtcaactgctatctcgccgactcgcagggcgaagaccgtgcccgtttcagcaccagcaggatgagtctcaagcgcacccttgcaagcgcccagccaggggcccaccccttcaccgtgacggagaccaccctcactcggaccctgagaccctggaaggacatgacgctggccgcgctggacgcccatcgtctcgtgccctacagtcgcagtcgtcccaacccccgaaacgaggaagtctgctggatcgagatgccgtag

SEQ ID NO: 1223 - DNA, 1047 bp, Adenovirus D27; identical to SEQ ID NO: 927
  MISC_FEATURE (1)..(1047): D27.orf00056 pIVa2 protein

SEQ ID NO: 1224 - DNA, 405 bp, Adenovirus D27; identical to SEQ ID NO: 928
  MISC_FEATURE (1)..(405): D27.orf00058 pIX protein

SEQ ID NO: 1225 - DNA, 1488 bp, Adenovirus D27; identical to SEQ ID NO: 929
  MISC_FEATURE (1)..(1488): D27.orf00060 E1B 55k E1B 55k protein

SEQ ID NO: 1226 - DNA, 207 bp, Adenovirus D27; identical to SEQ ID NO: 966
  MISC_FEATURE (1)..(207): D27.orf00063 E1A 14.8 kDa protein

SEQ ID NO: 1227 - DNA, 573 bp, Adenovirus D27
  MISC_FEATURE (1)..(573): D27.orf00065 E1A 28 kDa protein
atgagacacctgcgcctcctgccttcaactgtgcccggtgagctggctgtgcttatgctggaggactttgtggatacagtattggaggacgaactgcatccaagtccgttcgagctgggacccacacttcaggatctctatgatctggaggtagatgcccatgatgacgaccctaacgaggaggctgtgaatttaatatttccagaatctatgattcttcaggctgacatagccaacgaatctactccacttcatacaccgactctgtcacccatacctgaattggaagaggaggacgaactagacctccggtgttatgaggaaggttttcctcccagcgattcagaggatgaacggggtgagcagaccatggctctgatctcagactatgcttgtgtgattgtggaggaacaagtagtgattgaaaattctaccgagccagtggagggctgtagaaaatgccagtaccaccgggataagtctggagacccgaacgcatcatgcgctttgtgctatatgaaacagactttcagctttatttacagtaagtggagtgaatgtgagagaggctga

SEQ ID NO: 1228 - DNA, 126 bp, Artificial Sequence; identical to SEQ ID NO: 932
  D27.orf00066 hypothetical protein

SEQ ID NO: 1229 - DNA, 378 bp, Adenovirus D33
  MISC_FEATURE (1)..(378): D33.orf00002 E4 ORF1 protein
atggctgaatctctgtatgcttttatagatagccctggagggatcgctcccgttcaggaagggtttagcaatagatataatttcttttgccccgaatcttttcacattcctccgcatggggtggttttggttcacctaagagtgagcgtgctaattcctactggctaccaaggcagatttttggccttaaatgactaccatgccaggggcatactaacccagtccgatgtgatttttgccgggagaagacatgagctaactgtgctgctctttaaccacacggaccgatttttgtatgtccgcgagggccacccagtgggcacactgttgctggagagagtgatttttccttcagtgagacttgccactctggtttag

SEQ ID NO: 1230 - DNA, 393 bp, Adenovirus D33
  MISC_FEATURE (1)..(393): D33.orf00003 E4 ORF2 protein
atgcttgagcgacacgctgtcagctaccacattgtggttcctggggtcctagtgacttatttagaggacttttctattactcaaatgattaaagaaaaactacctcgctttatcactcacctcttggaaggcatcaccggtgacacaaagagagcttattccagcatgcagtttttgggcgctagctttggagcattaaagtactcactcacgcttgccagtcccacgcttagccctggctctgaattgtcagctgtagtggctgaggacttgagtgactttttgcagctgacgctgagacgtgagctgagggcagagggcagaacctcattgaatcttgttgttttgaacacgctgcaggtggtggagcagcaggatctgtttctaatatga

SEQ ID NO: 1231 - DNA, 354 bp, Adenovirus D33
  MISC_FEATURE (1)..(354): D33.orf00005 E4 ORF3 protein
atgaaggtctgcctgattatgaaagtggagggggcgctgtgggaacttttccacatgtgcggagtggacttacaccaacaatttgtagaaataattcaaggctggaaaaatgagaattacctgggaatggtgaatgagtgtaacctgatgattgatgaaatcgatggaggcccagcctttaatgtgattcttatgctggatgtacgcgtagagccactgctcgaagctacagtcgagcaccttgaaaatagagtgggttttgacctggctgtctgtttccaccagcacagcggcggggaacgctgtcacctgcgtgacttgcactttatcgtccttcgagaccgcttggaataa

SEQ ID NO: 1232 - DNA, 663 bp, Adenovirus D33
  MISC_FEATURE (1)..(663): D33.orf00008 E4 34 kDa protein
atgatcctgaccccagaggaaataaaaattttaaaaagatgtatgtcagtgtgcctgtgccccgctaccctggacttggtgagagctcagatggtgagcgggtacgagcgctggatcctgcattgccactgttcatccccgggctccctgcagtgtcgggcgggaggcaccctgctggccgtgtggttcaggagagtcatttacgggtgcatgttcaaccagcgcttcccatggtaccgccagattgtgaacagagacatgcccaaagagatcatgtatatgggcagtgtgttcatgaggggcaggcacctgatatactgccgcatctggtacgatggtcacgtgggttccatcatccccaacatgagctttggctggagcgccctgaattatgggctgctgaataacatggtgattatgtgctgcacttactgtgagaacatggcagagatcaggatgcggtgctgtgcccgacgcaccaggagactgatgctgaaggctgttgggattatagtcagagagacttgcgatcccgatcccatctgcagcagccgcaccgagccccggcggcagagactgctgagggcgctgatggagaggcacagacccatcctgttttccgagtatgaatctgtgcgttcttctcgttccaccagactgtga

SEQ ID NO: 1233 - DNA, 246 bp, Adenovirus D33
  MISC_FEATURE (1)..(246): D33.orf00010 E4 ORF6/7 protein
gtgaccttggactgtgaggcccgcttggatgacttttcagaggacggcttcatctcaatcaccgacccccgtttggctcgccaggaaactgtgtggattatagaccccaagtccagttcccgcactaatcagaacatttccctatttaaggccacccgtgctgagagaattgtttacactgtgaaatgggctggtggtgggagactgactacccgtgctggtgtaaaaatcaataaagatacatga

SEQ ID NO: 1234 - DNA, 1149 bp, Adenovirus D33; identical to SEQ ID NO: 156
  MISC_FEATURE (1)..(1149): D33.orf00011 L5 fiber

SEQ ID NO: 1235 - DNA, 150 bp, Adenovirus D33
  MISC_FEATURE (1)..(150): D33.orf00012 U protein
atgaaaattgtggaccaggaatttgacatccctttcaaggtgtggaggaagttcgccgcccgccggggactggagtaccagagctgggaggagggtaccgaggtgctgctcaacaactacaccagagacatactttcagatttcaagtaa

SEQ ID NO: 1236 - DNA, 390 bp, Adenovirus D33
  MISC_FEATURE (1)..(390): D33.orf00013 E3 14.6 kDa protein
atgactgaccacctggacctcgagatggacggccaggcctccgagcagcgcatcctgcaactgcgcgtccgacagcagcaggagcgggccgccaaggagctcctcgatgccatcaacatccaccagtgcaagaagggcatcttctgcctggtcaaacaggcaaagatcacctacgagctcgtgtccggcggcaagcagcatcgcctcacctatgagatgccccagcagaagcagaaattcacctgcatggtgggcgtcaaccccatagtcatcacccagcagtcgggcgagaccaacggctgcatccactgctcctgcgaaagccccgagtgcatctactccctcctcaagaccctttgcggactccgcgacctcctccccatgaactga

SEQ ID NO: 1237 - DNA, 123 bp, Adenovirus D33
  MISC_FEATURE (1)..(123): D33.orf00015 E3 RID-beta
atggaatttcttagactgctatcaggagaaaatggatatgccttcctattacttggcgattgttggggtagtcatggtctgctcctgcactttctttgccattatgatctacccatgttttaa

SEQ ID NO: 1238 - DNA, 276 bp, Adenovirus D33
  MISC_FEATURE (1)..(276): D33.orf00016 E3 10.4 K E3 ORF 4 10.4 kDa protein
atgattcctaggttcttcctatttaacatcctcttctgtctcttcaacatctgcgctgccttcgcagccgtctcgcacgcctcacccgactgtctcgggcccttccccacctacctcctctttgccctgctcacctgcacctgcgtctgcagcattgtctgcgtggtcatcaccttcctgcagctcatcgactggtgctgcgcgcgctacaattacctacaccacagtcccgaatacagggacgaaaacgtagccagaatcttaaggctcatatga

SEQ ID NO: 1239 - DNA, 813 bp, Adenovirus D33
  MISC_FEATURE (1)..(813): D33.orf00018 E3 CR1-gamma
atgaaggctttcacagcttgcgttctgattagcatagtcacacttagtgcagctgctggtaaatgctatcatacagttaatgtcactaggggagggaatattacacttacaggggcaggaatcaacactacatggacagcttatcataacgatggaaaggggcaaaatggttggttgcccatctgtacatggggcgatcccatctatgtgtgccatggaaatagcagtactatttccaatcttacagttgtagctcacaaaaatctaactgacagaactattaaggcatatagctatgagaacaaagatgattatgaaacagtaaattcatgcttttatgttgtaaaagttgttgagcttccaaccactaaagcgcccacacagtctactacacatccaaccaccacagccagtacaactactgagaccactactcaaactacacagctagacactacagtgcagaatagtactgtgttggttaggtatttgttaagggaggaaagtactactgaacagacagaggctacctcaagtgccttcagcagcactgcaaatttaacttcgcttgcttcggtaaatgagacgatcgtgccgatgatgtatggccaacattacccaggtttggatatacaaattactttcctgattgtctgtggggtctttatcctcgctgtccttctctactttgtctgctgcaaggccagagaaaaatctaggcggcccatctacaggccagtaatcggggaacctcagccactccaagtggatggaggcttaaggaatcttctcttctcttttacagtatggtga

SEQ ID NO: 1240 - DNA, 1224 bp, Adenovirus D33
  MISC_FEATURE (1)..(1224): D33.orf00019 E3 CR1-beta
atgaatactttgaccagtgtcgtgctgctctctcttcttgtggttcttagtcagggacaaatagaacatgaaaaacagagtgttcagtggggaaagaacataacgcttgtgggtcctaatgataaacctgttgaatggcacggacctagagatcaactttgtaagggaaaacaaatcttacacccagaattcaatcacacatgtaatgaacaaaacctcacactactttttgtgaataacactttccagggaatatattatggcattagaaatgatggtagaggtatgaaacaaattcaactaacagttgttgcacctcctgcctccacacgaaaacctttgtcaaagccaaaacaagtgaatgtccaatatggacataatgtaacattagaaggtcctccaggaatacctattgactggctcggaccaactaatcagctttgtaaaggaaaagaaattttacacccagaaataaaccatacctgtaatgttcaaaatttaacacttttatttgtaaactatactcaccgtggagcatattttggctttaacaaagacggaactgacagacatcactatgaggttactattctagatgggttcacaaatgcagggcagacaaaagaagagtcagtcagtgacaaatcaaaaggaaaaacttcttcaaaagagaaaaaaactcaaaaaaataactctcagagaaatgatgatgttaaagagttagattttcccagtggatctaatcaaactttagttggcccccctggatcaaaagttgattggtacacaacaaaaaatggtgactttacaaaattgtgtgatggattaaatggaccaaaaaatctgtgtaattatcagaacttaacattgcgaaatgtaagcagacaggacgaaggaacttattttgggtctaacgaacagtcaaagcattacagagttactgtctatacaaaacctagaaatcaaactaagagaatccagccatatactactaaaggaactacaaaatcaaccttaggtaatcacagctttgaattgcaactggcagatgatcaatctaatcaacaggatcaacaaattccatcaactactgtggcaatcgtggtgggagtgattgcgggctttataactataatcattgtcattctgtgctacatctgctgccgcaagcgtcccaggtcatacaatcatatggtagacccactactcagcttctcttactga

SEQ ID NO: 1241 - DNA, 252 bp, Adenovirus D33
  MISC_FEATURE (1)..(252): D33.orf00021 E3 gp 17.6 kDa protein
atgcagtgtgatatcacacatgacttcaaaaatgaatttgaaaccgaaagtgtgattgccatcgctaccatggacagtgaccgtgtagttctgctcatctcctggttgccagaagcccacccatacatgtcccatggtcttattcttgaatgtaatgttgagagaacatttgtgctcacatttgataactacagagcattcgcttctctcattgcctgtggtgatgttacatcgtggctgttcgtggcatga

SEQ ID NO: 1242 - DNA, 192 bp, Adenovirus D33
  MISC_FEATURE (1)..(192): D33.orf00022 E3 gp 17.6 kDa protein
atgtgtgatatcacactgcatgtggctagacttcatggcttgtggccccctaccaaggagaacatggtgggtttttctttggcttttgtgatcatggcctgcttgatgtcaggtctgctggtaggggctctagtgtggttcctaaagcgcaagcccaggtacggaaatgaagagaaggaaaaattgctataa

SEQ ID NO: 1243 - DNA, 594 bp, Adenovirus D33
  MISC_FEATURE (1)..(594): D33.orf00023 E3 CR1-alpha
atgagaatttttgctgtactctttgtggtgagtttaataaaagctgaactaagaacctactttggaatcccttgtcgtcatcctcggaacaagaccgtcttctttaccaaccagaccaaggttcgtctgaactgtacaaccaacaggaagtaccttctctggactttccaagacacctcactcgctgttgtcaatacccgtgacaacgacggtgttttaatccccaacaacctcaccagtggacttactttctctaccaacaaaacaaagctcatccttcaccacccttttgtagagggaacctaccagtgccgacacggaccttgtgttcacaacttccatttggtgaaccttaccagcagcagcacagttgctcctgaaactaacctttcttctgatactaacaaacctcgtgtcggaggtgagctttgggttccatctctaacagagggtgggagttctattgaagtggttgggtatttgattttaggggtggtccttggtgggtgcatagcagtgctgtatcaacttccttgctgggtcgaaatcagggtatttatctgctgggtcagacattgtggggaggaaccatga

SEQ ID NO: 1244 - DNA, 321 bp, Adenovirus D33
  MISC_FEATURE (1)..(321): D33.orf00024 E3 12.2 K E3 12.2 kDa protein
atgtcccatggtgactcggctgagctcgctcggttgaggcatctggaccactgccgccgcctgcgctgcttcgcccgggagagctgcggcctcatctactttgagtttcccgaggagcaccccaacggccctgcacacggagtgcggatcaccgtagagggcaccaccgagtctcacctggtcaggttcttcacccagcaacccttcctggtcgagcgggaccggggcgccaccacctacaccgtctactgcatctgtcctaccccgaagttgcatgagaatttttgctgtactctttgtggtgagtttaataaaagctga

SEQ ID NO: 1245 - DNA, 684 bp, Adenovirus D33
  MISC_FEATURE (1)..(684): D33.orf00025 L4 pVIII
atgagcaaggagattcccaccccttacatgtggagctatcagccccagatgggcctggccgcgggcgcctcccaggactactccacccgcatgaattggctaagtgccggcccctcgatgatctcacgggtcaacggggtccgtaaccatcgaaaccagatattgttggagcaggcggcggtcacctccacgcccagggcaaagctcaacccgcgtaattggccctccaccctggtgtatcaggaaatccccgggccgactaccgtactacttccgcgtgacgcactggccgaagtccgcatgactaactcaggtgtccagctggccggcggcgcttcccggtgcccgttccgcccacaaccgggtataaaaaccctggtgatccgaggcagaggcacacagctcaacgacgagttggtgagctcttcgatcggtctgcgaccggacggagtgttccaactagccggagctgggagatcctccttcactcccaaccaggcctacctgaccttgcagagcagctcttcggagcctcgctccggaggcatcggaaccctccagtttgtggaggagtttgtgccctcggtctacttcaaccccttctcgggatcgccaggcctctacccggacgagttcataccgaacttcgacgcagtgagagaatcggtggacggctacgactga

SEQ ID NO: 1246 - DNA, 219 bp, Adenovirus D33; identical to SEQ ID NO: 912
  MISC_FEATURE (1)..(219): D33.orf00026 L4 20 kDa protein

SEQ ID NO: 1247 - DNA, 186 bp, Adenovirus D33
  MISC_FEATURE (1)..(186): D33.orf00029 L4 22 kDa protein
gtgaagggtgacggtaagcacgagcggcagggctaccgatcatggaggacccacaaagccgcgatcatcgcctgcttgcaagactgcggggggaacatcgctttcgcccgccgctacctgctcttccaccgcggggtgaacatcccccgcaacgtgttgcattactaccgtcaccttcacagctaa

SEQ ID NO: 1248 - DNA, 2193 bp, Adenovirus D33
  MISC_FEATURE (1)..(2193): D33.orf00031 L4 100 kDa protein
atggaggagcagccgcgtaagcaggagcaggaggaggagaacttaaccacccacgaacaagcaaaaatcgagcaggacctgggcttcgaagagccggctcgtctagaacccccacaggatgaacaggagcacgagcaagacgcaggccaggaggagaccgacgctgggctcgagcatggctacctagaggaggacatgctgctgaaacacttgcagcgccaatccctcatcctcagggacgccctggccgaccggagcgagacccccctcagcgtcgaggagctaagtagggcctacgagctcaaccttttctcgccgcgcgtgccccccaaacgccagcccaacggcacctgcgagcccaacccgcgcctcaacttttaccccgttttcgcggtccccgaggccctggccacctatcacatctttttcaagaaccaaaagatccccgtctcctgtcgcgccaaccgcacccgcgccgacgcgctcctcgctctggggcccggcgcgcgcatacctgatatcgcttccctggaagaggtgcccaagatcttcgaagggctcggtcgggacgagacgcgcgcggcgaacgctctgaaagaaacagcagaggaagagggtcaaactagcgccctggtagagttggaaggcgacaacgccaggctggccgtactcaagcgcagcgtcgagctcacccacttcgcctaccccgccgttaacctcccgcccaaggtcatgcgtcgcatcatggatcagctcatcatgccccacatcgaggccctcgatgagacgcaagagcagcggcccgaggacgcccagcccgtggtcagcgacgagcagctcgcgcgctggctcgaaaaccgcgacccccaggtcctggagcagcggcgcaagctcatgctggccgtggtccttgttaccctcgagctggaatgcatgcgccgcttcttcagcgaccccgacaccctgcgcaaggtcgaggagacactgcactacactttcaggcacggctttgtcaggcaggcctgcaagatctccaacgttgagctgaccaacctggtctcctgcctggggatcctgcacgagaaccgcctggggcagaccgtgcttcactctaccctcaagggagaggcgcgtcgggactacatccgcgactgcgtctttctctttctttgccacacctggcagtcggccatgggagtgtggcagcagtgtctagaggacgagaacctgaaggagctggacaagcttcttgctagaaacctcaaaaagctgtggacgggcttcgacgagcgcaccgtcgcctcggacctggccgaaatagtcttccccgagcgcctgaggcagacgctgaaaggcgggctgcccgacttcatgagccaaagcatgttgcaaaactaccgcactttcattctcgagcgatcggggatcctgcccgccacctgcaacgccttcccctccgactttgtcccgctgagctaccgcgagtgtcccccgccgctgtggagccactgctacctcttgcagctggccaactacatcgcccaccactcggatgtgatcgaggacgtgagcggcgaggggctgctagagtgccactgccgctgcaacctgtgctccccgcaccgctccctggtctgcaacccacagctcctcagcgagacccaggtcatcggtaccttcgagctgcaaggtccggagaagtccaccgctccgctgaaactcacgccggggttgtggacttccgcgtacctgcgcaaatttgtacccgctgactaccacgcccatgagataaagttcttcgaggaccaatcgcgtccgcagcacgcggatctcacggcctgcgtcatcacccagggcgcgatcctcgcccaattgcacgccatccaaaaatcccgccaagagtttcttctgaaaaagggtagaggggtctacctggacccccagacgggcgaggtgctcaacccgggtctcccccagcatgccgaggaagaagcaggagccgctagtggaggagatggaagaagaatgggacagccaggcagaggaggacgaatgggaggaggagacagaggaggaagaattggaagaggtggaagaggagcaggcaacagagcagcccgtcgccgcaccatccgcgccggcagccccggcggtcacggatacaacctccgctccggtcaagcctcctcgtag

SEQ ID NO: 1249 - DNA, 1470 bp, Adenovirus D33
  MISC_FEATURE (1)..(1470): D33.orf00032 E2A DNA-binding protein
atggccggcggcagtcaggacgtgcgccggttcatggaccgagaggccactccgccccggggccacggttcagcgcgctatccgccggagcaggagaggagcccctcgccgccacctcctctgcccaccaagcgccgaaagtatcagcgggtgggctccgggtcttccgaggaggacgtggtccccgtggacagccctccaaaaaagaagcaagccagaaagaccaagcatgtgaccaagacggaccccgacgaagagatgccccaggaagaagccgtgatcgtgggagtgggattcagccagccgccggtcctgttgaaggaaggaaaggacggaaaacgcatcgtagagcccgcgacccccggtgtcctgaacgtgcgcaaccccctgagtctgcctctggtctcgtcctgggagaagggcatggataccatgaacgtgctgatggaacgctatcgcgtcgacagcggcctgcgcgatgcttacaagctcatgcccgagcagaccgagatcttccaaaagatgtgccagacctggatgaacgaggaggcccgcggcctgcaactgaccttcagcaccagtaaatcatttagcaccgtgatgggccgcatgttgcaaggttacatattcagccacagcgggatcgcgcacaagaattgggaatgcaccggctgcgccctgtgggatcacggctgcaccgaggtggaaggccagctcaagtgcctgcatggaacggtgatgatccacaaggatcacgtggtggagatggatgtgaccagcgagaacggccagcgtgcgttgaaggagcagcccagcaaggccaaggtgacccagaaccgctggggacggagcgtggtgcaactgaccagccatgacgcgcgctgctgcgtgcatgatgccgggtgtggaaataaccagttcagcgggaagagctgcggcctgttcttcagcgagggggccaaggcccagcaagctttcaagcagatcttggcctttgtcaaggccctctacccgaatatgcagcgcggctcggggatgatgctgatgccagtgcactgcgagtgtaaccacaagcctcagagcgtgcccttcctgggccgccagctgtgcaagatgacaccgttcggcctgagcaacgccgaggacctggacaaggatcagatcagcgacaagagcgtgctggccagcgtgaagcaccccagtctgatggtgttccagtgctgcaaccccgtgtaccgcaactcgcgcgcgcagagcaccggtcccaactgcgatttcaagatctccgcgcctgacatactgggcgccctgcagatgagccggcgcatgtggagcgagaccttccccgagaccccagtgcccaaactggtgatccccgagttcaagtggcagcccaagtaccagtaccgcaacgtggccctccccagcgcggcgcacaacgacgagcgcgagaaccccttcgacttttaa

SEQ ID NO: 1250 - DNA, 630 bp, Adenovirus D33
  MISC_FEATURE (1)..(630): D33.orf00034 L3 23.6 kDa protease
atgagcggctccagcgaaagagagctcgcggccatcgtgcgcgacctgggctgcgggccctactttttgggcacccacgacaagcgcttccctggcttcctcgccggcgacaagctggcctgcgccatcgtcaacacggccggccgcgagaccggaggcgtgcattggctcgccttcggctggaacccgcgctcgcgcacctgctacatgttcgacccctttgggttctcggaccgccggctcaagcagatttacagcttcgagtacgaggccatgctgcgccgcagcgccctggcctcctcgcccgaccgctgtctcagcctcgagcagtccacccagaccgtgcaggggcccgactccgccgcctgcggacttttctgttgcatgttcttgcatgccttcgtgcactggcccgaccgacccatggacggaaaccccaccatgaacttgctgacgggggtgcccaacggcatgctacaatcgccacaggtgctgcccaccctgaggcgcaaccaggaggagctctaccgcttcctagcgcgccactccccttactttcgatcccaccgcgccgccatcgaacacgccaccgcttttgataaaatgaaacaactgcgtgtatctcaataa

SEQ ID NO: 1251 - DNA, 2862 bp, Adenovirus D33; identical to SEQ ID NO: 216
  MISC_FEATURE (1)..(2862): D33.orf00036 L3 hexon

SEQ ID NO: 1252 - DNA, 705 bp, Adenovirus D33
  MISC_FEATURE (1)..(705): D33.orf00037 L3 pVI
atggaagacatcaattttgcgtccctggctccgcggcacggcacgcggccgttcatgggcacctggaacgagatcggcaccagccagctgaacgggggcgccttcaattggagcagtgtctggagcgggcttaaaaatttcggctcgacgctccggacctatgggaacaaggcctggaatagtagcacggggcagttgttgagggaaaagctcaaagaccagaacttccagcagaaggtggtggacgggctggcctcgggcattaacggggtggtggacatcgcgaaccaggccgtgcagcgcgagataaacagccgtctggacccgcggccgcccacggtggtggagatggaagatgcaactcttccgccgcccaagggcgagaagcgcccgcggcccgacgcggaggagacgatcctgcaggtggacgagccgccctcgtacgaggaggccgtgaaggccggcatgcccaccacgcgcatcatcgcgccgctggccacgggtgtaatgaaacccgccacccttgacctgcctccaccacccacgcccgctccaccgaaggcagctccggttgtgcagccccctccggtggcgaccgccgtgcgccgcgtccccgcccgccgccaggcccagaactggcagagcacgctgcacagtatcgtgggcctgggagtgaaaagtctgaagcgccgccgatgctattga

SEQ ID NO: 1253 - DNA, 225 bp, Adenovirus D33
  MISC_FEATURE (1)..(225): D33.orf00038 L2 pX core protein L2 pX
atggctctcacttgccgcctgcgcatccccgtcccgaattaccgaggaagatcccgccgcaggagaggcatggcaggcagcggcctgaaccgccgccggcggcgggccatgcgcaggcgcctgagtggcggctttctgcccgcgctcatccccataatcgccgcggccatcggcacgatccctggcatagcttccgttgcgctgcaggcgtcgcagcgccgttga

SEQ ID NO: 1254 - DNA, 1032 bp, Adenovirus D33
  MISC_FEATURE (1)..(1032): D33.orf00040 L2 pV
atgcttgtgtcctcccccccgcaagcgacgatgtcaaagcgcaaaatcaaggaggagatgctccaggtcgtcgccccggagatttatggaccaccccaggcggaccagaaaccccgcaaaatcaagcgggttaaaaaaaaggatgaggtggacgagggggcagtagagtttgtgcgcgagttcgctccgcggcggcgcgtaaattggaaggggcgcagggtgcagcgcgtgttgcggcccggcacggcggtggtgttcacgcccggcgagcggtcctcggtcaggagcaagcgtagctatgacgaggtgtacggcgacgacgacatcctggaccaggcggcggagcgggcgggcgagttcgcctacgggaagcggtcgcgcgaagaggagctcatctcgctgccgctggacgagagcaaccccacgccgagcctgaagcccgtgaccctgcagcaggtgctgccccaggcggtgctgctgccgagccgcggggtcaagcgcgagggcgagaacatgtacccgaccatgcagatcatggtgcccaagcgccggcgcgtggaggacgtgctggacaccgtgaaaatggatgtggagcccgaggtcaaggtgcgccccatcaagcaggtggcgccgggcctgggcgtgcagaccgtggacattcagatccccaccgacatggatgtcgacaaaaaaccctcgaccagcatcgaggtgcagaccgacccctggctcccagcctccaccgctaccgtctccacttctaccgccgccacggctaccgagcctcccaggaggcgaagatggggcgccgccagccggctgatgcccaactacgtgttgcatccttccattatcccgacgcctggctaccgcggcacccggtactacgccagccgcaggcgcccagccaccaagcgccgccgccgcaccacccgccgccgtctggccccagcccgcgtgcgccgcgtaaccacgcgccggggccgctcgctcgttctgcccaccgtgcgctaccaccccagcatcctttaa

SEQ ID NO: 1255 - DNA, 585 bp, Adenovirus D33
  MISC_FEATURE (1)..(585): D33.orf00041 L2 pVII
atgtctattctcatctcacccagcaataacaccggctggggtcttactaggcccagcaccatgtacggaggagccaagaagcgctcccagcagcaccccgtccgcgtccgcggccacttccgcgctccctggggagcttacaagcgggggcggacttccaccgccgccgtgcgcaccactgtcgacgacgtcatcgactcggtggtcgccgacgcgcgcaactatacccccgccccctccaccgtggacgcggtcatcgacagcgtggtggccgacgcgcgcgactatgccagacgcaagagccggcggcgacggatcgccaggcgccacaggagcacgcccgccatgcgcgccgcccgagctctgctgcgccgcgccagacgcacgggtcgccgggccatgatgcgagccgcgcgccgcgccgccactgcaccccccgcaggcaggactcgcagacgagcggccgccgccgccgccgcggccatttctaacatgaccagacccaggcgcggaaacgtgtactgggtacgcgactccgtcacgggcgtgcgcgtgcccgtgcgcacccgtcctcctcgtccctga

SEQ ID NO: 1256 - DNA, 1554 bp, Adenovirus D33; identical to SEQ ID NO: 186
  MISC_FEATURE (1)..(1554): D33.orf00042 L2 penton

SEQ ID NO: 1257 - DNA, 1692 bp, Adenovirus D33
  MISC_FEATURE (1)..(1692): D33.orf00045 L1 pIIIa
atgcagcaagccccggaccccgccataagggcggcgctgcaaagccagccgtccggtctagcatcggacgactgggaggccgcgatgcaacgcatcatggccctgacgacccgcaaccccgagtcctttagacaacagccacaggccaacagactttcggccattctggaggcggtggtcccctctcggaccaaccccacgcatgagaaggtgctggcgatcgtgaacgcgctggcggagaacaaggccatccgtcccgacgaggccgggctggtgtacaacgccctgctggagcgcgtgggccgctacaacagcacaaacgtgcagtccaacctggatcggctggtgacggacgtgcgcgaggccgtggcgcagcgcgagcgattcaagaacgagggccttggctcgctggtggcgctgaacgccttcctggcaacgcagccggcgaacgtgccgcgcgggcaggacgattataccaactttatcagcgcgctgcggctgatggtgaccgaggttccccagagcgaggtgtaccagtcgggcccggactactttttccagactagcagacagggcctgcagacggtgaacctgagccaggctttcaagaacctgcgcgggctgtggggcgtgcaggcgcccgtgggcgaccggtcgacggtgagcagcttgctgacgcccaactcgcggctgctgctgctgctgattgcgcccttcaccgacagcggcagcgtgaaccgcaactcgtacctgggccacctgctgacgctgtaccgcgaggccataggccaggcgcaggtggacgagcagaccttccaggagattactagcgtgagccgcgccctgggtcagaacgacaccgacagtctgagggccaccctgaacttcttgctgaccaatagacagcagaagatcccggcgcagtacgcgctgtcggccgaggaggagcgcatcctgagatatgtgcagcagagcgtagggctgttcctgatgcaggagggcgccacccccagcgctgcgctggacatgaccgcgcgcaacatggaacctagcatgtatgccgccaaccggccgttcatcaataagctgatggactacctgcaccgcgcggcggccatgaactcggactactttaccaatgccattttgaacccgcactggctcccgccgccggggttctacacgggcgagtacgacatgcccgaccccaacgatgggttcctgtgggacgacgtggacagcgcggtgttctcaccgaccttgcaaaagcgccaggaggcggtgcggacgcccgcgagcgagggcgcggtgggtcggagcccctttcctagcttagggagtttgcatagcttgccgggctcggtgaacagcggcagggtgagccggccgcgcttgctgggcgaggacgagtacctgaacgactcgctgctgcagccgccgcgggtcaagaacgccatggccaataacgggatagagagtctggtggacaaactgaaccgctggaagacctacgctcaggaccatagggagcctgcgcccgcgccgcggcgccagcgccacgaccggcagcggggcctggtgtgggacgacgaggactcggccgacgatagcagcgtgttggacttgggcgggagcggtggggccaacccgttcgcgcatctgcagcccaaactggggaggcggatgttttga

SEQ ID NO: 1258 - DNA, 1122 bp, Adenovirus D33
  MISC_FEATURE (1)..(1122): D33.orf00048 L1 52 kDa protein
atgcatcccgtcctgcgccaaatgcgtcccacccccccggcgaccaccgcgaccgcggccgtagcaggcgccggcgctagccagccacagccacagacagagatggacttggaagagggcgaagggctggcgagactgggggcgccgtccccggagcgacacccccgcgtgcagctacagaaggacgtgcgcccggcgtacgtgcctccgcagaacctgttcagggaccgcagcggggaggagcccgaggagatgcgcgactgccgttttcgggcgggcagggagctgcgcgagggcctggaccgccagcgcgtgctgcgcgacgaggatttcgagccgaacgagcagacggggatcagccccgcgcgcgcgcacgtggctgcggccaacctggtgacggcctacgagcagacggtgaagcaggagcgcaacttccaaaagagtttcaacaaccatgtgcgcacgctgatcgcgcgcgaggaggtggccctgggcctgatgcacctgtgggacctggcggaggccatcgtgcagaatccggacagcaagcctctgacggcgcagctgttcctggtggtgcagcacagcagggacaacgaggcgttcagggaggcgctgctgaacatcgccgagcccgagggccgctggctgctggagctgattaacatcttgcaaagcatcgtagtgcaggagcgcagcctgagcctggccgagaaggtggcggcgatcaactactcggtgctgagcctgggcaagttttacgcgcgcaagatttacaagacgccgtacgtgcccatagacaaggaggtgaagatagacagcttttacatgcgcatggcgctcaaggtgctgacgctgagcgacgacctgggcgtgtaccgcaacgaccgcatccacaaggccgtgagcgcgagccggcggcgcgagctgagcgaccgcgagctgatgctgagcctgcgccgggcgctggtagggggcgccgccggcggcgaggagtcctacttcgacatgggggcggacctgcattggcagccgagccggcgcgccttggaggccgcctacggtccagaggacgacttggatgaggaagaggaggaggatgcacccgctgcggggtactga

SEQ ID NO: 1259 - DNA, 1854 bp, Adenovirus D33
  MISC_FEATURE (1)..(1854): D33.orf00049 pTP
atggattatttcctgccgctgcgcaacatctggaaccgcgtccgcgagttcccgcgcgcctccaccaccgccgccggcatcacctggatgtcccgctacctctacggctaccaccgcctcatgctcgaggacctggcccctggcgcgccggccacccagcgctggccgctctaccgccagccgccgccgcacttcctagtcggataccagtacctcgtgcgcacctgcaacgactacgtcttcgactcgcgcgccttctcgcggctcaggtactccgagatcgtgcaacccggcctgcagaccgtcaactggtcgctcatggccaactgcacctacaccatcaacaccggggcctaccaccgcttcgtcgacatggacgacttccaggacaccctcacccgcgtgcaacaggccatcctcgccgagcgcgtcgtcgccgacctggcgcttgtgcaaccgctcaggggcgtcggggtcacccgcatggaagactccgcctccgccagtgatgacattgagaggctcatgcatgactactacaagaacctgagccggtgtcagggccaggcctggggcatggccgagcggctccgcatccagcaagcgggacccaaggacctggtcctcctcgccaccatccgccgccttaaaaacgcctacttcaattacatcatcagcaaccgcaattctaacagcgtccacggggctactacgtgtttgagcttaccttgcgactgcgattggctagacgctttcctcgaaagattctccgatccggtcgatctcgacgcgctcacgtcccctacaccgcaattgataagatgcatcgtcagcgccctatcgctgcccaacggggacccgccccattaccgggagatgaccggcggcgtcttcacgctgcgtcctcgcgaacggggtcgcgccgtcaccgaaaccatgcgtcgccgccgcggggagatgatcgagcgcttcgtcgaccgtctcccggtgcgtcgccgtcgtcgtcgggccccgccaccaccaccgcccccagaggaagaaatagaagaagaggtcgtcatggaagaagaggaagaggaggaggcccccggggatttcgagcgcgaggtgcgcgccaccatcgccgagctcatccggctcctggaagacgagctcacggtctcggcccgcaacgcccagtttttcaacttcgccgtggatttctacgaagccatggaaaggctggaggccatcggcgacatcagcgagatgcccctgcgccgctggatcatgtacttcttcgtcaccgagcacatcgccaccaccctcaactacctcttccagcgcctgcgcaactacgccgtcttcacgcggcacgtggagctcaacctcgcgcaggtggtcatgcgcgcgcgcgacgccgacggggacgtagtctacagccgcgtctggaacgagagcgggctgggcgccttctcgcagctcatgggtcgcatctcaaatgacctcgccgccaccgtcgagcgcgcgggccgcggcgatctccaggaggaggagatcgagcagttcatgtccgagatcgcctaccaggacaactcgggcgacgtgcaagagatcctgcgtcaggccgccgtcaatgacgccgagattgattctgttgaactgtctttcaggttcaaagtcacggggcccgtggtcttcacgcagaggcggcagatccaggatgtcaaccgccgcgtcgtcgcgcacgccagcgctctcagggcgcagcaccgggacctgcccgagcgccacgccgacgtgcctctgccgcccctgcccgcggggccggaaccgccgctgccgccgggagcgcgtccgcgacaccgcttctaa

SEQ ID NO: 1260 - DNA, 3300 bp, Adenovirus D33
  MISC_FEATURE (1)..(3300): D33.orf00051 E2B DNA polymerase
gtggccccgcgcagctacgggctcatgcaatgcgtggacacggccaccaactccccagtggaaatcaagtaccatctgcatctcaagcacgccctcacccgcctctacgaggtcaacctcagaaccctgcccccggacctggatctccgcgacaccatggacagctcccaactgcgtgccctcgtcttcgctctccgcccccgccgcgccgagatctggacctggctcccgcgcgggctcgtcagcctctccgtcctcgaggagccccagggtgagtcccacgcaggcgaacatgaaaaccaccagccagggccgccactcctgaagttcctcctcaagggacgcgcagtgtatctcgtggatgaggtacagcccgtgcagcgctgcgagtactgcggacgcttttacaagcatcagcacgagtgctcggttcgccggcgggatttctactttcatcacatcaacagccactcgtccaactggtggcaggaaatccagttcttcccaatcggctctcatcctcgcacggagcggctctttgtcacctacgatgtagaaacctacacctggatggggtccttcggcaagcagctcgtccccttcatgctggtcatgaaattctcgggggaccccgagctggtcgccctcgctcgcgatctcgccgtgcgcttacgctgggatcgctgggagcgggaccccctcaccttctactgcgtcaccccagaaaagatggccgtgggccagcagttccgcctctttcgcgacgagctccagaccctcatggcccgcgagctctgggcttccttcatgcaagccaacccacatctccaggagtgggccctcgagcagcacggcctgcaatgccccgaggacctcacctacgaggagctcaaaaagctgccgcacatcaaaggccgcccgcgattcatggaactttacatcgtcgggcacaacatcaacggcttcgacgagatcgtcctcgccgcccaggtcatcaacaaccgagcctccgtcccgggccctttccgcatcagccgcaatttcatgccgcgagcaggcaagattctcttcaatgacgtcactttcgctctgcctaaccccctctcgaagaagcgcaccgatttcgagctctgggagcacggcggctgcgacgactcggacttcaagtaccagttcttgaaagtcatggtcagggacaccttcgccctgactcacacctcgctccgcaaggccgctcaagcttacgccctccccgtggagaagggctgctgtccctacaaggccgtgaaccatttctacatgctgggctcttaccgtgcggacgatcgaggattcccgctccgggagtactggaaggatgacgaggagtatgccctcaaccgcgagctgtgggagaagaaaggagaggcgggttatgacatcatccgagaaacgctggactactgcgccatggacgtcctcgtcaccgccgagctcgtcgccaagctgcaagactcctacgcgcacttcatccgcgactcggtccgactgccccacgcccactttaacatcttccaacggcccaccatctcctccaactcgcacgccatctttcgccagatcgtcttccgcgccgagcagccccagcgcaccaatctcggccccgccttcttggccccctcgcacgagttgtatgactacgtgcgcgccagcatccgcggggggcgctgttatcccacctacatcggcatcctctcagagcccatctatgtgtatgacatctgcggcatgtatgcctccgcgctcacgcaccccatgccctggggtccgcccctcaacccctacgagcgagcgatggccgcccgcgagtggcagatggccttggatgatgcatcctcaaaaatagactattttgacaaggaactatgtcccggcatcttcaccatcgatgcggacccccctgacgagcatctgcttgatgtgttgccccctttctgctcgcgcaagggcggcagactctgctggaccaacgagcccctgcgcggcgaggtggccaccagcgtggacctggtcaccctgcataaccgcggctggcgcgtcaggatcgtgcccgacgagcgcaccgccgtcttccccgaatggaagtgcgtcgcgcgcgagtatgtccagctcaacatcgcggccaaggagcgcgccgaccgtgacaaaaatcagaccatgagatccatcgccaagcttctctccaatgccctctatggctccttcgccaccaagcttgacaataaaaaaatagtcttttctgaccagatggatgaaagtctcctaaaaagcatcgcggcagggcaagccaacatcaaatcctcctcgtttctagaaactgacaacctgagtgccgaggtcatgcccgctctcgagagggaatacctaccccaacagctggcgctcgtggacagcgacgcggaagagagtgaggacgagcacagacccgcccccttttatacccccccgtcggggaccccaggtcacgtggcctacacctacaagccaataaccttcttggatgcggaggagggggacatgtgcctgcataccgtggaaaaagtggaccccctggtggacaacgaccgctacccctcgcacgtggcctcctttgtcttggcgtggacgcgcgcctttgtctcagagtggtccgagtttctctacgaggaggaccgcgggacgcccctgcaggacaggcccatcaagtccgtctacggggacacagacagcctgtttgtcaccgagcgcggacacagactcatggagacgcgaggtaagaagcgcatcaaaaagaacgggggaaaactggtttttgaccccgaacaccccgagctcacctggctcgtcgagtgcgagaccgtctgcgcccactgcggagcggacgccttcgcccccgagtccgtctttctcgcacccaagctctacgccctgcaatccctcctctgtcccgcctgcgggcgctcttccaagggcaagctccgcgccaagggccacgccgccgaggccctcaactacgagctcatggtcaactgctatctcgccgacgcgcagggcgaagaccgtgcccgtttcagcaccagcaggatgagtctcaagcgaacccttgcaagcgcccagcccggggcccaccccttcaccgtgacggagaccacgctcacgcggaccctgagaccatggaaggacatgacgctggcagcgctggacgcccatcgtctcgtgccctacagtcgcagtcgtcccaacccccgaaacgaggaagtctgctggatcgagatgccgtag

SEQ ID NO: 1261 - DNA, 1047 bp, Adenovirus D33
  MISC_FEATURE (1)..(1047): D33.orf00052 pIVa2
atgcccatggccgacgggctcaagcccctgaaaaactttgcttccctgcaagagctactctcgctcggcggagaccgcctccttggcgagctcgtccgggaaaacctccaagtcagggacatgctcaacgaggtggcccccctcctccgggacgacggcagctgcatctccttgaactaccacctgcaacccgtcatcggggtcatctacggcccaaccgggtgcggcaagtcccagctgttgagaaacctgctctcctcgcagctcatcacccccgccccggaaaccgtttttttcatcgccccgcaggtggacatgatccccccctccgagatgaaagcctgggagatgcagatctgcgaggggaactttgccccggggcccgagggaaccatcgtcccccaatctggcaccctccgccccaaatttattaaaatgtcttatgatgatctcacccaggagcataattacgatgtctctgaccccagaaacgtctttgccaaagccgcagcccacgggcccattgccatcatcatggatgagtgcatggaaaacctgggcgggcacaagggcgtctccaaattcttccacgcattcccttccaagttgcatgataagttccccaagtgcacgggctacaccgtcctggtggtcctgcacaacatgaaccccaggcgggatctgggcggcaacattgccaacctcaagatccaggccaaactgcacatcatctccccccgcatgcatccctcccagctcaaccgctttgccaacacctacaccaaggggctccccgtggccatcagtctcctcctcaaggacatcatccagcaccacgcccagcgcccctgctatgactggatcatctacaacacgaccccagagtacgaggccatgcagtggtgctacctacacccccgggacgggctcatgcccatgtacctcaacatccaatcccacctctaccgggtcctggaaaaaatccaccgcactctcaatgatcgggaaaggtggaccagggcctaccgcgcgcgaaaaaataaataa

SEQ ID NO: 1262 - DNA, 402 bp, Adenovirus D33
  MISC_FEATURE (1)..(402): D33.orf00054 IX pIX
atgaacgggactggcggggccttcgaaggggggctttttagcccttatttgacaacccgcctgccgggatgggccggagttcgtcagaatgtgatgggatcgacggtggacgggcgcccagtgcttccagcaaattcctcgaccatgacctacgcgaccgtggggaactcgtcgcttgacagcaccgccgcagccgcggcagccgcagccgccatgacagcgacgagactggcttcgagctacatgcccagcagcagcagtagcccctctgtgcccagttccatcatcgccgaggagaaactgctggccctgctggccgagctggaagccctgagccgccagctggccgccctgacccagcaggtgtccgatctccgcgagcaacagcagcaaaataaatga

SEQ ID NO: 1263 - DNA, 1488 bp, Adenovirus D33
  MISC_FEATURE (1)..(1488): D33.orf00056 E1B 55 kDa protein
atggagccagaacacccaactgagcaggggctacattctggacttcgcggccatgcacctgtggagggcctgggtcaggcagcggggacagagaatcttgaactactggcttctacagccagcagctccgggtcttcttcgtctacacagacaaacatccatgttggaggaagaaatgaggcaggccatggacgagaacccgaggagcggcctggaccctccgtcggaagaggagctggattgaatcaggtatccagcctgtacccagagcttagcagggtgctgacatccatggccaggggagtgaagagggagaggagcgatgggggcaataccgggatgatgacagagctgacggccagcctgatgaatcgcaagcgcccagagcgcattacctggcatgagctacagatggagtgcagggatgaggtgggcctgatgcaggataaatatggcctggagcagataaaaacccactggttgaacccagatgaggattgggaggaggccattaagaaatatgccaagatagccctacgcccagattgcaagtacagggtgaccaagacggtgcatatcagacatgcctgctacatctcagggaacggggcagaggtggtcatcgataccctggacaaggccgccttcaggtgttgcatgatgggaatgagagccggagtgatgaatatgaattccatgatctttatgaacatgaagttcaatggagagaagtttaatggggtgctgttcatggccaacagccacatgaccctgcatggctgcgactttttcggctttaacaatatgtgcgcagaggtctggggcgcttccaagatcaggggatgtaagttttatggctgctggatgggcgtggtcggaagacccaagagcgagatgtctgtgaagcagtgtgtgtttgagaaatgctacctgggagtctctaccgagggcaatgctagagtgagacactgctcttccctggagacgggctgcttctgcctggtgaagggcacagcctctctgaagcataatatggtgaagggctgcacggatgagcgcatgtacaacatgctgacatgcgactcgggggtctgccatattctgaagaacatccatgtgacctcccacccccggaagaagtggccagtgtttgagaataacctgcttatcaagtgccacgtgcacctgggtgccagaaggggcaccttccagccgtaccagtgtaactttagccagaccaagctgctgttggagaacgatgccttctccagggtgaacctgaacggcatctttgacatggatgtctcggtgtacaagatcctgagatacgatgagaccaagtccagggtgcgcgcttgcgagtgcgggggcagacacaccaggatgcagccagtggccctggatgtgaccgaggagctgagaccagaccacctggtgatggcctgtaccgggaccgagttcagctccagtggggaggacacagattag

SEQ ID NO: 1264 - DNA, 207 bp, Adenovirus D33
  MISC_FEATURE (1)..(207): D33.orf00058 E1A 14.9 kDa protein
gtgtcagaggatgagtcatcgccctcagaagacgaccacccgtctccccccgatctcacagatgacacgcccctgcaagtgatcagacccaccccagtcagactcagtggggagaggcgaatggctgttgacaaaatcgaggacttgttgcaggacatgggtggggatgaacctttggacctgagcttgaaacgccccaggaactag

SEQ ID NO: 1265 - DNA, 579 bp, Adenovirus D33
  MISC_FEATURE (1)..(579): D33.orf00059 E1A 28 kDa protein
atgagacacctgcgcctcctgcctgaaactgtgcctatggacatggctgtgcttctactggatgactttgtgaatacagtattggaggatgaactgcatccaactccgtttgagctgggacccacacttcaggacctatatgatctggaggtagatgcccatgatgacgacccgaacgaagaggctgtgaatttaatatttccagaatctatgattcttcaggctgacatagccaacgaatctatacctactccacttcatacaccgactctgtcacccatacctgaattggaagaggaggacgaactagacctccggtgttatgaggaaggttttcctcccagcgattcagaggacgaacagggtgagcagagcatggctataatctcagactatgcttgtgtggttgtggaagagcattttgtgttggacaatcctgaggtgcccgggcaaggctgtagatcctgccaatatcaccgggatcagaccggagacccaaatgcttcatgcgctctgtgttacatgaaaaagactttcagctttatttacagtaagtggagtgaatgtgagagaggctga

SEQ ID NO: 1266 - DNA, 138 bp, Adenovirus D37
  MISC_FEATURE (1)..(378): D37.orf00002 E4 14.0 kDa protein
atggctgaatctctgtatgcttttatagatagtcctggagggattgctcccgtccaggaaggggctagcaatagatataatttttttgccctgaatctttccacattcctccgcatggggtggtattgcttcacctaa

SEQ ID NO: 1267 - DNA, 258 bp, Adenovirus D37
  MISC_FEATURE (1)..(258): D37.orf00003 E4 14.0 K E4 ORF1 14.0 kDa protein
gtggtattgcttcacctaaaagtgagtgtgctggttcctactggatatcagggcagatttatggccttgaatgactaccatgccagggacatactaacccagtctgatgtgatttttgccggaagaagacaggaacttactgtgctgctttttaatcacacggaccgatttttgtatgtccgcaagggccacccagtgggtaccctgctgctggagagagtgatttttccttcagtgaaaatagccaccttagtttag

SEQ ID NO: 1268 - DNA, 393 bp, Adenovirus D37; identical to SEQ ID NO: 897
  MISC_FEATURE (1)..(393): D37.orf00004 E4 14.5 K E4 ORF2 14.5 kDa protein

SEQ ID NO: 1269 - DNA, 354 bp, Adenovirus D37
  MISC_FEATURE (1)..(354): D37.orf00006 E4 13.6 K E4 ORF 3 13.6 kDa protein
atgaaggtctgcctgattatgaaagtggagggggcactgtgggagcttttccacatgtgcggagtggacttacaccaacaatttgtagagataatccaaggctggaaaaatgagaattacctggggatggtgcaggaatgtaacctgatgattgatgaaatcgatggagggccagcctttaatgtgattcttatgctggatgtgcgcgtagagccactgctcgaagccacggtcgagcaccttgaaaatagagtgggttttgacctggctgtctgtttccaccagcacagcggaggggaacgctgtcacctgcgtgacttgcactttatcgtccttcgagaccgtttggaataa

SEQ ID NO: 1270 - DNA, 159 bp, Adenovirus D37
  MISC_FEATURE (1)..(159): D37.orf00008 E4 14.2 K E4 ORF4 14.2 kDa protein
atgctgttcaagggcccatttctgctggcagaagtacgacaaggtacgcaagagaatccactacaatgcaaaccgagattcaatccagctcgctccgccatcatccatatcgcagggcccgtttaccacgatctgatgaggaaaccagggcttcactga

SEQ ID NO: 1271 - DNA, 663 bp, Adenovirus D37
  MISC_FEATURE (1)..(663): D37.orf00009 E4 34.1 kDa protein
atgatcctcaccacagaggaaataaaaattttaaaaagatgtatgtcagtgtgcctgtgccccgctaccctggacttggtaagagctcaaatggtgagcgggtacgagcgctggatcctgcattgccactgttcatcccctggctccctgcagtgtcgggcgggaggcaccctgctggccgtgtggttcaggagagtcatttacgggtgcatgttcaaccagcgcttcccctggtaccgccagattgtaaacagaaacatgcccaaagagatcatgtacatgggcagtgtgttcatgaggggcaggcacctgatatactgtcgcatctggtacgatggtcacgtgggttccatcattcccaacatgagctttggctggagcgccctgaattatgggctgctgaataacatggtgattatgtgctgcacttactgtgagaacatggcagagatcaggatgcggtgctgtgcccgtcgcaccaggagactgatgctgaaggctgttgggatcatagtcagagagacttgtgatcccgatcccatttgcagcagccgcaccgagccccggcggcagagactgctgagggcgctgatggagaggcacagacccatcctgttttccgagtatgaatctgtgcgttcttctcgttccaccagactgtga

SEQ ID NO: 1272 - DNA, 246 bp, Adenovirus D37
  MISC_FEATURE (1)..(246): D37.orf00010 E4 ORF6/7 protein
gtgaccttggactgtgaggcccgcttggatgacttttcagaggacggctttatttcaatcaccgacccccgtttggctcgccaggaaactgtgtggattatagaccccaagtccaattcccgcactaatgagaatatttccctatttaaggctacccgtgctgagagaaccgtgtacactgtaaaatgggctggtggtgggagactgtctactcgtgctggtgtaaaaatcaataaagatacatga

SEQ ID NO: 1273 - DNA, 1098 bp, Adenovirus D37; identical to SEQ ID NO: 157
  MISC_FEATURE (1)..(1098): D37.orf00013 L5 fiber

SEQ ID NO: 1274 - DNA, 150 bp, Adenovirus D37
  MISC_FEATURE (1)..(150): D37.orf00014 U protein
atgaaaattgtggaccaggaatttgacatccctttcaaggtgtggaggaagttcgccgcccgccggggactggagtaccagagctgggaggagggtaccgaggtgttgctgagcaactacaccagagacatactttcagatttcaagtaa

SEQ ID NO: 1275 - DNA, 393 bp, Adenovirus D37
  MISC_FEATURE (1)..(393): D37.orf00016 E3 14.8kDa protein
atgactgaccaccacctggacctcgagatggacggccaggcctccgagcagcgcatcctgcaactgcgcgtccgtcagcagcaggagcgggccgccaaggagctccttgatgccatcaacatccaccagtgcaagaagggcatcttctgcctggtcaaacaggcaaagatcacctacgagctcgtgtccaacggcaaacagcatcgccttacctatgagatgccccagcagaagcagaagttcacctgcatggtgggcgtcaaccccatagtcatcacccagcagtcgggcgagaccaacggctgcatccactgctcctgcgaaagccccgagtgcatctactcccttctcaagaccctttgcggactccgcgacctcctccccatgaactga

SEQ ID NO: 1276 - DNA, 393 bp, Adenovirus D37
  MISC_FEATURE (1)..(393): D37.orf00018 E3 14.7kDa protein
atgcagactctgctcatgctgctatccctcctatcccctgccctagccacttatgctgattactctaaatgcaaattcgcagacatatggaatttcttagattgctatcaggaaaaaattgatatgccctcctattacttggtgattgtgggaatagtcatggtctgctcctgcactttctttgccatcatgatttacccctgttttgatctcggctggaactctgttgaagcattcacatacacactagaaagcagttcactagcctccacgccaccacccacaccgcctcctcgcagaaatcagttccccctgatacagtacttagaagagccccctccccgacccccttccactgttagctactttcacataaccggcggcgatgactga

SEQ ID NO: 1277 - DNA, 276 bp, Adenovirus D37
  MISC_FEATURE (1)..(276): D37.orf00019 E3 10.4kDa protein
atgattcctaggttcttcctatttaacatcctcttctgtctcttcaacatctgcgctgcctttgcagccgtctcgcacgcctcgcccgactgtctcgggcccttcccaacctacctcctctttgccctgctcacctgcacctgcgtctgcagcattgtctgcctggtcatcaccttcctgcagcttatcgactggtgctgtgcgcgctacaattatctccatcacagtcccgaatacagggacaagaacgtagccagaatcttaaggctcatctga

SEQ ID NO: 1278 - DNA, 843 bp, Adenovirus D37
  MISC_FEATURE (1)..(843): D37.orf00023 E3 30.7kDa protein
atgaaggctttcacagcttgcgttctgattagcctagtcacacttagtgtagctattaaaaatcaatatcatgttcataatgttaccagagatggatatatcacattaaatgtaacaattgataatactacctggacaagatatcatttaaataagtggcatcaaatttgtacgtggtcagacccatcatacaaatgtcacagcaatggcagcattaccattcatgctttcaatattacttctggccagtacaaagctgaaagttttactaactggtttagatattacggtaatcataaacatgaaattcatatttttaacataactgtaattgagcatcctacaacaaaagcacccaccactgctaatacagctacatcaattaaatcaacaaccacacagcctactactagggagacaactcaacctaccaccacagtcagtacaactactgagaccactactcaaactacacagctagacacaacagtgcagaatagcactgtgttggttaggtatctgttgagggaggaaagtactactgaacagacagaggctacctcaagtgcctttagcagcactgcaaatttaacttcgcttgcttggactaatgaaaccggagtatcattgatgaatcatcagcctttctcaggtttggatattcaaattacttttctggttgtttgtgggatctttattcttgtggttcttctgtactttgtctgctgcaaagccagagagaaatctaggaggcccatctacaggccagtaatcggggaacctcagccactccaagtggaagggggtctaaggaatcttcttttctctttttcagtatggtga

SEQ ID NO: 1279 - DNA, 1287 bp, Adenovirus D37
  MISC_FEATURE (1)..(1287): D37.orf00024 E3 47.5kDa protein
atgaatacagtgatccgtatcgtgctgctctctcttcttgtagcttttagtcaggcaggatttcatactatcaatgctacatggtgggctaatataactttagtgggacccccagacacaccagtcacttggtatgatactcaaggattgtggttttgcaatggcagtagagttaagaatcctcaaatcagacatacatgtaatgatcaaaaccttactttgatccatgtgaacaaaacttatgaaagaacatacatgggttataatagacaagggactaaaaaagaagactacaaagttgtagttataccacctcctcctgctactgtaaaaccacagccagagccagagtatgtgtttgtttatatgggagagaacaaaactctagaaggtcctccgggaactccagtcacatggtttaatcaggatggaaagaaattttgtgaaggagaaaaagttcttcatccagaatttaaccacacctgtgacaaacaaaaccttatactactgtttgtgaattttacacatgatggagcttaccttgggtacaatcatcaaggaacccagagaacacactatgaagttacagtattagatctttttccagattctggccaaatgaaaattgaaaatcatagtgaggaaacagagcaaaaaaatgatgaacatcataactggcagaaacagggtgggcaaaaacagggtgggcaaaaaacaaatcaaacaaaagttaatgacaggagaaaaacagcgcaaaaaagaccatcaaagctaaagccggcaactattgaggcaatgctggttacagtgactgccgggtctaacttaactttggttggacctaaagcagaaggaaaagttacttggtttgatggagatttaaaaagaccatgtgagcctaattacagactaagacacgaatgtaataatcaaaacttaactctgattaatgtaactaaagattatgagggaacttactatggtacaaatgacaaagatgagggcaaaaggtacagagtgaaagtaaatactacaaattctcaatctgtgaaaattcagccatataccagacaaactactcctgatcaagagcacaaatttgaattacagttcgaaactaatggaaattatgattcaaaaattccctcaaccactgtggcaatcgtggtgggtgtgattgcgggcttcataactctgatcattgtcttcatatgctacatctgctgccgcaagcgtcccagggcatacaatcatatggtagacccactactcagcttctcttactaa

SEQ ID NO: 1280 - DNA, 471 bp, Adenovirus D37
  MISC_FEATURE (1)..(471): D37.orf00028 E3 18.6kDa protein
atgaaggggctcttgctgattatcctttccctggtggggggtgtgctgtcatgccacgaacagccacgatgtaacatcaccacaggcaatgagaggaacgactgctctgtagttatcaaatgcgagcaccattgtcctctcaacattacattcaaaaataagaccatgggaaatgtatgggtgggattctggcaaccaggagatgagcagaactacacggtcactgtccatggtagcaatggcaatcacactttcggtttcaaattcatttttgaagtcatgtgtgatatcacactacatgtggctagacttcatggcttgtggccccctaccaaggataacatggtgggtttttctttggcttttgtgatcatggcctgcttgatgtcaggtctgctggtaggggctctagtgtggtttctgaaacgcaagcccaggtatggaaatgaagagaaggaaaaattgctataa

SEQ ID NO: 1281 - DNA, 567 bp, Adenovirus D37
  MISC_FEATURE (1)..(567): D37.orf00029 E3 21.8kDa protein
gtggtgagtttaataaaagctaaactcttgcaatactctggaccttgtcgtcatcaactcaacgagaccgtctacctcaccaaccagactgaggtaaaacttacctgcagaccacacaagacctatatcatctggttcttcgagaacacctcatttgcagtctccaacactcactgcaacgacggtgttgaacttcccaacaacctttccagtggactgagttacaatacacgtagagctaagctcatcctctacaatccttttgtagagggaacctaccagtgccagagcggaccttgcttccacagttttactttggtgaacgttaccggcagcagcacagccgctccagaaactaaccttccttctgatactatcaaaccttgtttcggaggtgagctaaggcttcccccttctcaggagggggttagcccatacgaagtggtcgggtatttgattttaggggtggtcctgggtgggtgcatagcggtgctagctcagctgccttgctgggtggaaatcaaaatctttatatgctgggtaagacattgtggggaggaactatga

SEQ ID NO: 1282 - DNA, 321 bp, Adenovirus D37
  MISC_FEATURE (1)..(321): D37.orf00030 E3 12.2kDa protein
atgtcctatggtgactcggctgagctcgctcggttgaggcatctggaccactgccgccgcctgcgctgctttgcccgggagagctacggcctcatctactttgagctgcccgaggagcaccccaacggccctgcacacggagtgcggatcaccgtagagggcaccaccgagtctcacctggtcaggttcttcacccagcaacccttcctggtcgagcgggaccggggcgccaccacctacaccgtctactgcatttgtcctaccccgaagttgcatgagaatttttgttgtactctttgtggtgagtttaataaaagctaa

SEQ ID NO: 1283 - DNA, 684 bp, Adenovirus D37
  MISC_FEATURE (1)..(684): D37.orf00032 L4 pVIII
atgagcaaggagattcccaccccttacatgtggagctatcagccccagatgggcctggccgcgggcgcctcccaggactactccacccgcatgaactggcttagtgccggcccctcgatgatctcacgggtcaacggggtccgtaaccatcgaaaccagatattgttgcagcaggcggcggtcacctccacgcccagggcaaagctcaacccgcgtaattggccctccaccctggtgtatcaggaaatccccgggccgactaccgtactacttccgcgtgacgcactggccgaagtccgcatgactaactcaggtgtccagctggccggcggcgcttcccggtgcccgctccgcccacaatcgggtataaaaaccctggtgatccgaggcagaggcacacagctcaacgacgagttggtgagctcttcaatcggtctgcgaccggacggagtgttccaactagccggagccgggagatcgtccttcactcccaaccaggcctacctgaccttgcagagcagctcttcggagcctcgctcgggaggcatcggaaccctccagttcgtggaggagtttgtgccctcggtctacttcaaccccttctcgggctcgccaggcctctacccggacgagtttataccgaacttcgacgcagtgagagaagcggtggacggctacgactga

SEQ ID NO: 1284 - DNA, 219 bp, Adenovirus D37
  MISC_FEATURE (1)..(219): D37.orf00033 L4 20 kDa protein
ttgaccaccagggagctgaggaaccggatcttccccactctttatgccatttttcagcaaagtcgaggtcagcagcaagagctcaaagtaaaaaaccggtctctgcgctcgctcacccgcagttgcttgtaccacaaaaacgaagatcagctgcagcgcactctcgaagacgccgaggctctgttccacaagtactgcgcgctgactcttaaagactaa

SEQ ID NO: 1285 - DNA, 186 bp, Adenovirus D37
  MISC_FEATURE (1)..(186): D37.orf00034 L4 22 kDa protein
gtgaagggtgacggtaagcacgagcgacagggctaccgatcatggagggcccacaaagccgcgatcatcgcctgcttgcaagactgcggggggaacatcgctttcgcccgccgctacctgctcttccaccgcggggtgaacatcccccgcaacgtgttgcattactaccgtcaccttcacagctaa

SEQ ID NO: 1286 - DNA, 2199 bp, Adenovirus D37
  MISC_FEATURE (1)..(2199): D37.orf00035 L4 100kDa protein
atggaggagcagccgcgtaagcaggagcaggaggaggacttaaccacccacgagcaacccaaaatcgagcaggacctgggcttcgaagagccggctcgtctaaaacccccacaggatgaacaggagcacgagcaagacgcaggccaggaggagaccgacgctgggctcgagcatggctacctgggaggagaggaggatgtgctgctaaaacacctgcagcgccagtccctcatcctccgggacgccctggccgaccggagcgaaacccccctcagcgtcgaggagctgtgtcgggcctacgagctcaacctcttctcgccgcgcgtgccccccaaacgccagcccaacggcacctgcgagcccaacccgcgtctcaacttctatcccgtctttgcggtccccgaggcccttgccacctatcacatctttttcaagaaccaaaagatccccatctcctgtcgcgccaatcgcactcgcgccgacgcgctcctcgctctggggcccggcgcgcgcatacctgatatcgcttccctggaagaggtgcccaagatcttcgaagggctcggtcgggacgagacgcgcgcggcaaacgctctgaaagaaacagcagaggaagagggttacactagcgccctggtagagttggaaggcgacaacgccaggctggccgtgcttaagcgcagcgtcgagctcacccatttcgcctaccccgccgtcaacctcccgcccaaggtcatgcgtcgcatcatggatcagctcatcatgccccacatcgaggcccttgatgaaagtcaggaacagcgccccgagaacgcccagcccgtggtcagcgacgagatgctcgcgcgctggctcgggacccgcgacccccaggccctggagcagcggcgcaagctcatgctggccgtggtcctggtcacccttgagctcgaatgcatgcgccgcttttttaccgaccccgagaccctgcgcaaggtcgaggagaccctgcactacactttcagacacggtttcgtcaggcaggcctgcaagatctccaacgtggagctgaccaacctggtctcctgcctggggatcctacacgagaaccgcttgggacagaccgtgctccactctaccctgaagggcgaggcgcggcgggactacatccgcgactgcgtctttctctttctctgccacacatggcaagcggccatgggcgtgtggcagcagtgtctcgaggacgagaacctgaaggagctggacaagcttcttgctagaaaccttaaaaagctgtggacgggcttcgacgagcgcaccgtcgcctcggacctggccgagatcgtcttccccgagcgcctgaggcagacgctgaaaggagggctgcccgacttcatgagccagagcatgttgcaaaactaccgcactttcattctcgagcgatctgggatgctgcccgccacctgcaacgccttcccctccgactttgtcccgctgagctaccgcgagtgtcccccgccgctgtggagccactgctacctcttgcagctggccaactacattgcccaccactcggatgtgatcgaggacgtgagcggcgaggggctgctcgagtgccactgtcgctgcaacctatgctccccgcaccgctccctggtctgcaacccccagctactgagcgagacccaggtcatcggtacctttgagctgcaaggtccgcaggagtccaccgctccgctgaaactcacgccggggttgtggacttccgcgtacctgcgcaaatttgtacccgaggactactacgcccatgagataaagttcttcgaggaccaatcgcgtccgcagcacgcggatctcacggcctgcgtcatcacccagggcgcgatcctcgcccaattgcacgccatccaaaaatcccgccaagagtttcttctgaaaaagggtagaggggtctacctggacccccagacgggcgaggtgctcaacccgggtctcccccagcatgccgaggaagaagcaggagccgctagtggaggagatggaagaagaatgggacagccaggcagaggaggacgaatgggaggaggagacagaggaggaagacttggaagaggtggaagaggagcaggcaacagagcagcccgtcgccgcaccatccgcgccggcagcccctccggtcacggatacaacctccgcagctccggccaagcctcctcgtag

SEQ ID NO: 1287 - DNA, 1473 bp, Adenovirus D37
  MISC_FEATURE (1)..(1473): D37.orf00036 E2A DNA binding protein
atggccggcggcagtcaggacgtgcgccggttcatggagcgagaggccactccgccccggggccacgggtcggcgcgctatccgccggagcaggagaggagcccctcgccgccgccacctcctctgcccaccaagcgccgaaagtatcagcgggtgggctccgggtcttccgaggaggacgtggtccccgtggacagccctccaaaaaagaagcaagccagaaagaccaagcatgtgaccaaggtagaccccgacgaagagatgccccaggaagacgccgtgatcgtgggagtgggattcagccagcctccggttctgttgaaggaaggcaaggacggaaaacgcatcgtcgagcccgcgacccctggtgtcctgaacgtgcgcaaccccctgagtctgcctctggtctcgtcatgggagaagggcatggataccatgaacgtgctgatggaacgctaccgcgtcgacagcggcttgcgcgatgcttacaagctcatgccggagcagaccgagatcttccagaagatgtgccagacctggatgaacgaggaggcccgcgggatgcaactgacattcaccacccagaaagcatttagcaccattatgggtcgcctgttgcaaggttacattttcagccacagcgggatcgcgcacaagaattgggagtgcaccggctgcgtcctgtgggatcacggctgcaccgaggtggaaggtcagctcaagtgtctgcatggaacggtgatgattcacaaggaccacgtggtggagatggatgtgaccagcgagaacggacagcgcgcgctgaaggagcagcccagcaaggctaaggtgacccagaaccgctggggacggagcgtggtgcaactgaccagccatgacgcgcgctgctgcgtgcatgatgccgggtgcgggaataaccagttcagcgggaagagctgcggcctgttttttagcgagggggccaaggcccagcaagctttcaagcagatcgcggccttcgtcaaggccctctacccgaatatgcagcgcggcgcggggatgatgctgatgcccgtgcactgcgagtgtaaccacaagcctcagagcgtgcccttcctgggccgccagctgtgcaagatgaccccgttcggcctgagcaacgccgaggacctggacaaggatcagattagcgacaagagcgtgcttgccagtgtgaagtaccccagtctgatggtgttccagtgctgcaaccccgtgtaccgcaactcgcgcgcgcagagcaccggtcccaactgcgatttcaagatctccggccctgacatgctgggcgccctgcaaatgagccggcgcatgtggagcgagaccttccccgagactccagtgcccaaactggtgatccccgagttcaagtggcagcccaagttccagtaccgcaacgtggccctccccagcgcggcgcacaacgacgagcgcgagaaccccttcgacttttaa

SEQ ID NO: 1288 - DNA, 624 bp, Adenovirus D37
  MISC_FEATURE (1)..(624): D37.orf00038 L3 protease
atgagcggctccagcgaacgagagctcgcggccatcgtgcgcgacctgggctgcgggccctactttttgggcacccacgacaagcgcttcccgggcttcctcgccggcgacaagctggcctgcgccatcgtcaacacggccggccgcgagaccgggggcgtgcactggctcgcctttggctggaacccgcgctcgcgcacctgctacatgttcgaccccttcgggttctcggaccgccggctcaagcagatttacagcttcgagtacgaggccatgctgcgccgaagcgccctggcctcctcgcccgatcgctgtcttagcctcgaacagtccacccagaccgtgcaggggcccgactccgccgcctgcggactcttctgttgcatgttcttgcatgccttcgtgcactggcccgaccgacccatggacgggaaccccaccatgaacttgctgacgggggtgcccaacggcatgctacaatcgccacaggtgctgcccaccctcaggcgcaaccaggaggagctctaccgcttcctcgcgcgccactccccctactttcgctcccaccgcgccgccatcgaacacgccaccgcttttgataaaatgaaacaactgcgtgtatga

SEQ ID NO: 1289 - DNA, 2850 bp, Adenovirus D37; identical to SEQ ID NO: 217
  MISC_FEATURE (1)..(2850): D37.orf00042 L3 hexon

SEQ ID NO: 1290 - DNA, 705 bp, Adenovirus D37
  MISC_FEATURE (1)..(705): D37.orf00043 L3 pVI
atggaagacatcaattttgcgtccctggctccgcggcacggcacgcggccgttcatgggcacctggaacgagatcggcaccagccagctgaacgggggcgccttcaattggagcagtgtctggagcgggcttaaaaatttcggctcgacgctccggacctatgggaacaaggcctggaatagtagcactgggcagttgttaagggaaaagctcaaagaccagaacttccagcaaaaggtggtggacgggctggcctcgggcattaacggggtggtggacatcgcgaaccaggccgtgcagcgcgagataaacagccgcctggacccgcggccgcccacggtggtggagatggaagatgcaactcttccgccgcccaagggcgagaagcgaccgcggcccgacgcggaggagacaatcctgcaagtggacgagccgccctcgtacgaggaggccgtcaaggccggcatgcccaccacgcgcatcatcgcgccgctggccacgggtgtaatgaaacccgctacccttgacctgcctccaccacccacgcccgctccaccaaaagcagctccggttgtgcagccccctccggtggcgaccgccgtgcgccgcgtccccgcccgccgccaggcccagaactggcagagcacgctgcacagtatcgtgggcctgggagtgaaaagtctgaagcgccgccgatgctattga

SEQ ID NO: 1291 - DNA, 1005 bp, Adenovirus D37
  MISC_FEATURE (1)..(1005): D37.orf00045 L2 pV
atgtcaaagcgcaaaatcaaggaggagatgctccaggtcgtcgccccggagatttacggaccaccccaggcggaccagaaaccccgcaaaatcaagcgggttaaaaaaaaggatgaggtggacgagggggcagtagagtttgtgcgcgagttcgctccgcggcggcgcgtaaattggaaggggcgcagggtgcagcgtgtgttgcggcccggcacggcggtggtgttcacgcccggcgagcggtcctcggtcaggagcaagcgtagctatgacgaggtgtacggcgacgacgacatcctggaccaggcggcggagcgggcgggcgagttcgcctacgggaagcggtcgcgcgaagaggagctgatctcgctgccgctggacgaaagcaaccccacgccgagcctaaagcccgtgaccctgcagcaggtgctgccccaggcagtgctgctgccgagccgcggggtcaagcgcgagggcgagagcatgtacccgaccatgcagatcatggtgcccaagcgccggcgcgtggaggacgtgctggacaccgtaaaaatggatgtggagcccgaggtcaaggtgcgccccatcaagcaggtggcgccgggcctgggcgtgcaaaccgtggacattcagatccccaccgacatggatgtcgacaaaaaaccctcgaccagcatcgaggtgcaaaccgacccctggctcccagcctccaccgctaccgcgtccacttctaccgccgccacggctaccgagcctcccaggaggcgaagatggggcgccgccagccggctgatgcccaactacgtgttgcatccttccatcatcccgacgccaggctaccgcggcacccggtactacgccagccgcaggcgcccagccagcaaacgccgccgccgcaccgccacccgccgccgtctggcccccgcccgcgtgcgccgcgtgaccacgcggcggggccgctcgctcgttctgcccaccgtgcgctaccaccccagcatcctttaa

SEQ ID NO: 1292 - DNA, 591 bp, Adenovirus D37
  MISC_FEATURE (1)..(591): D37.orf00046 L2 pVII
atgtctattctcatctcgcccagcaataacaccggctggggtcttactaggcccagcaccatgtacggaggagccaagaaacgctcccagcagcaccccgtccgcgtccgcggtcacttccgcgctccctggggcgcttacaagcgggggcggacctctgctcctgccgccgtgcgcaccaccgtcgacgacgtcatcgactcggtggtcgccgatgcgcgcaactacacccccgccccctcgaccgtggacgcggtcatcgacagcgtggtggcagacgcgcgtgactatgccagacgcaagagccggcggcgacggatcgccaggcgccaccggagcacgcccgccatgcgcgccgcccgagctctgctgcgccgcgccagacgcacgggccgccgggccatgatgcgagccgcgcgccgcgctgccactgcacccacccccgcaggcaggactcgcagacgagcggccgctgccgccgccgcggccatctctagcatgaccagacccaggcgcggaaacgtgtactgggtgcgcgactccgtcacgggcgtgcgcgtgcccgtgcgcacccgtcctcctcgtccctga

SEQ ID NO: 1293 - DNA, 1560 bp, Adenovirus D37; identical to SEQ ID NO: 187
  MISC_FEATURE (1)..(1560): D37.orf00047 L2 penton

SEQ ID NO: 1294 - DNA, 1608 bp, Adenovirus D37
  MISC_FEATURE (1)..(1608): D37.orf00049 L1 pIIIa
atgcaacgcatcatggccctgacgacccgcaaccccgagtcctttagacaacagccgcaggccaacagactctcggccattctggaggcggtggttccttctcggaccaaccccacgcacgagaaggtgctggcgatcgtgaacgcgctggcggagaacaaggccatccgtcccgacgaggccgggctagtgtacaacgccctgctggagcgcgtgggccgctacaacagcacaaacgtgcagtccaacctggaccggctggtgacggacgtgcgcgaggccgtggcgcagcgcgagcggttcaagaacgagggcctgggttcgctggtggcgctgaacgccttcctggcgacgcagccggcgaacgtgccgcgcgggcaggatgattataccaactttataagcgcgctgcggctgatggtgaccgaggtgccccagagcgaggtgtaccagtcgggcccggactactttttccagacgagcagacagggcctgcagacggtgaacctgagtcaggctttcaagaacctgcgcgggctgtggggcgtgcaggcgcccgtgggcgaccggtcgacggtgagcagcttgctgacgcccaactcgcggctgctgctgctgctgatcgcgcccttcaccgacagtggcagcgtgaaccgcaactcgtacctgggtcacctgctgacgctgtaccgcgaggccataggccaggcgcaggtggatgagcagaccttccaggagatcactagcgtgagccgcgcgctgggtcagaacgacaccgacagtctgagggccaccctgaacttcttgctgaccaatagacagcagaagatcccggcgcagtacgcgctgtcggccgaggaggagcgcatcctgagatatgtgcagcagagcgtagggctgttcctgatgcaggagggggccacccccagcgccgcgctggacatgaccgcgcgcaacatggaacctagcatgtacgccgccaaccggccgtttattaataagctgatggactacctgcaccgcgcggcgtccatgaactcggactactttaccaatgccatcttgaacccgcactggctcccgccgccggggttctacacgggcgagtacgacatgcctgaccccaacgacgggtttttgtgggacgacgtggacagcgcggtgttctcaccgaccttgcaaaagcgccaggaggcggtgcgcacgcccgcgagcgagggcgcggtgggtcggagcccctttcctagcttagggagtttgcatagcttgccgggctcggtgaacagcggcagggtgagccggccgcgcttgctgggcgaggacgagtacctgaacgactcgctgctgcagccgccgcgggtcaagaacgccatggtcaataacgggatagagagtctggtggacaaactgaaccgctggaaaacctacgctcaggaccatagggaacctgcgcccgcgccgcggcgacagcgtcacgaccggcagcggggcctggtgtgggacgacgaggactcggccgacgatagcagcgtgttggacttgggcgggagcggtggggccaacccgttcgcgcatctgcagcccagactggggcgacggatgttttga

SEQ ID NO: 1295 - DNA, 1125 bp, Adenovirus D37
  MISC_FEATURE (1)..(1125): D37.orf00051 L1 52/55K protein
atgcatcccgtcctgcgccaaatgcgtcccacccccccggcgaccaccgcgaccgcggccgtagcaggcgccggcgctagccagccacagccacagacagagatggacttggaagagggcgaagggctggcgagactgggggcgccgtccccggagcgacatccccgcgtgcagctgcagaaggacgtgcgcccggcgtacgtgcctgcgcagaacctgttcagggaccgcagcggggaggagcccgaggagatgcgcgactgccggtttcgggcgggcagggagctgcgcgagggcctggaccgccagcgcgtgctgcgcgacgaggatttcgagccgaacgagcagacggggatcagccccgcgcgcgcgcacgtggcggcggccaacctggtgacggcctacgagcagacggtgaagcaggagcgcaacttccaaaagagtttcaacaaccacgtgcgcaccctgatcgcgcgcgaggaggtggccctgggcctgatgcacctgtgggacctggcggaggccatcgtgcagaacccggacagcaagcctctgacggcacagctgttcctggtggtgcagcacagcagggacaacgaggcgttcagggaggcactgctgaacatcgccgagcccgagggtcgctggctgctggagctgattaacatcttgcagagcatcgtagtgcaggagcgcagcctgagcctggccgagaaggtggcggcgatcaactactcggtgctgagcctgggcaagttttacgcgcgcaagatttacaagacgccgtatgtgcccatagacaaggaggtgaagatagacagcttttacatgcgcatggcgctcaaggtgctgacgctgagcgacgacctgggcgtgtaccgcaacgaccgcatccacaaggccgtgagcacaagccggcggcgcgagctgagcgaccgcgagctgatgctgagtctgcgccgggcgctggtaggaggcgccaccggcggtgaggagtcctactttgacatgggggcggacctgcattggcagccgagccgacgcgccttggaggccgcctacggtccagaggacttggatgaggaagaggaagaggaggaggatgcacccgttgcggggtactga

SEQ ID NO: 1296 - DNA, 1854 bp, Adenovirus D37
  MISC_FEATURE (1)..(1854): D37.orf00054 E2B pTP
atggactatttcctgcccctgcgcaacatctggaaccgcgtccgcgagttcccgcgcgcctccaccaccgccgccggcatcacctggatgtcccgctacctctacggctaccaccgactcatgcttgaggacctggccccgggcgcgccggccacccagcgctggccgctctaccgccagccgccgccgcactttctagtcggataccagtacctcgtgcgcacctgcaacgactatgtcttcgactcgcgcgccttctcgcggctcaggtactccgaggtcgtgcaacccggcctgcagaccgtcaactggtcgcttatggccaactgcacttacaccatcaacacaggggcctaccaccgcttcgtcgacatggacgacttccaggacaccctcacccgcgtgcaacaggccatcctcgccgagcgcgtcgtcgccgacctggcgctcgtgcagccgttcaggggcgtcggggtcacccgcatggaagactccgcctccgccagtgatgacatcgagaggctcatgcatgactactacaagaacctgagccggtgtcagggccaggcctggggcatggccgagcggctccgcatccagcaagcgggacccaaggacctggtcctcctcgccaccatccgccgcctcaaaaacgcctacttcaattacatcatcagcaaccgcaattctaacagcgtccacagggctgctacgtgtttgagcttaccttgcgactgcgattggctagacgctttcctcgaaagattctccgatccggtcgatctcgacgcgctcacgtgccctacaccgcaattgataagatgcattgtcagcgccctatcgctgcccaacggggacccaccccattaccgggagatgaccggcggcgtcttcacgctgcgtcctcgcgaacggggtcgcgccgtcaccgaaaccatgcgtcgccgccgcggggagatgatcgagcgcttcgtcgaccgtctcccggtgcgtcgccgtcgtcgtcgggccccgccaccaccaccgcccccagaggaagaaatagaagaagaggtcgtcatggaagaagaggaagaggaggaggcccccggggatttcgagcgcgaggtgcgcgccaccatcgccgaactcatcaggctcctggaagacgagctcacggtctcggcccgcaacgcccagtttttcaacttcgccgtggatttctacgaggccatggaaaggctggaggccattggcgacatcagcgaaatgcccctgcgccgctggattatgtacttcttcgtcaccgagcacatcgccaccaccctcaactacctcttccaacgcctgcgcaactatgccgtcttcgcgcggcacgtggagctcaacctcgcgcaggtggtcatgcgcgcgcgcgacgccgacggggacgtggtttacagccgcgtctggaacgagagcggcctgggcgccttctcgcagctcatgggtcgcatctcgaatgaccttgccgccaccgtagagcgcgcgggccgcggcgatctccaggaggaggaaatcgagcagttcatgtccgagatcgcctaccaggacaactcgggcgacgtgcaagagatcctgcgtcaggccgccgtcaatgacgccgagattgattctgttgaactgtctttcaggttcaaagtcacggggcccgtggtcttcacgcaaaggcggcagatccaggatgtcaaccgccgcgtcgtcgcgcacgccagcgctctcagggcgcagcaccgggacctgcccgagcgccacgccgacgtgcctctaccgccactgcccgcggggccggaaccgccgctgccgccgggagcgcgtccgcgacaccgcttctaa

SEQ ID NO: 1297 - DNA, 3267 bp, Adenovirus D37
  MISC_FEATURE (1)..(3267): D37.orf00056 E2B polymerase
gtggacacgaccaccaactcacccgtggagatcaagtaccatctgcatctcaagcacgccctcacccgcctctacgaggtcaacctcagaaccctgcccccggacctggatctccgcgacaccatggacagctcccaactgcgcgccctcgttttcgctctccgcccccgccgcgccgagatctggacctggctcccgcgcgggctcgtcagcctctccgtcctcgaggagccccagggtgagtcccacgcaggcgaacatgaaaaccaccagccagggccgccactcctgaagttcctcctcaagggacgcgctgtgtatctcgtggatgaggtacagcccgtgcagcgctgcgagtactgcggacgcttttacaagcatcagcacgagtgctcggttcgccggcgggatttctactttcatcacatcaacagccactcgaccaactggtggcaggaaatccagttcttcccaatcggctctcatcctcgcacggagcggctctttgtcacctacgatgtagaaacctacacctggatggggtccttcggcaagcagctcgtccccttcatgctggtcatgaaattctccggggaccccgagctggtcgccctcgctcgcgatctcgccgtgcgcttacgctgggatcgctgggagcgggaccccctcaccttctactgcgtcaccccagaaaagatggccgtgggccagcagttccgcctctttcgcgacgagctccagaccctcatggcccgcgagctctgggcttcattcatgcaagccaacccacatctccaggagtgggcgctcgagcagcacggcctgcaatgccccgaggacctcacctacgaggaactcaaaaagctgccgcacatcaaaggccgcccgcgattcatggaactctacatcgtcgggcacaacatcaacggcttcgacgagatcgtcctcgccgcccaggtcatcaacaaccgagcctccgttccgggccctttccgcatcacccgcaatttcatgccgcgggcaggcaagattctcttcaatgacgtcactttcgctctgcctaaccccctctcgaagaagcgcaccgatttcgagctctgggagcacggcggctgcgacgactcggatttcaagtaccagttcttgaaagtcatggttagggataccttcgccctgacgcacacctcgctccgcaaggccgctcaagcttacgccctccccgtggagaagggctgctgtccctacaaggccgtgaaccatttctacatgctgggctcttaccgtgcggacgatcgaggattcccgctccgggagtactggaaggatgacgaggagtacgccctcaaccgcgcgctgtgggagaagaaagaagaggcgggttatgacatcatccgtgaaacgctggactactgcgccatggacgtccttgtcaccgccgagctcgttgccaagctgcaagactcctacgcgcacttcatccgcgactcggtccgcttgccccacgcccactttaacatcttccaacggcccaccatctcctccaactcgcatgccatctttcgccagatcgtcttccgcgccgagcagccccagcgcaccaatctcggccccgctttcttggccccctcgcacgagttgtatgactatgtgcgcgccagcatccgcggggggcgctgttatcccacctacatcggcatcctctcggagcccatctatgtctacgacatctgcggcatgtacgcctccgccctcacgcatcccatgccctggggtccgcccctcaacccctacgagcgagcgctggccgcccgcgagtggcagatggccttggatgatgcatcctcaaaaatcgattattttgacaaggaactctgtccgggcatcttcaccatcgatgcggacccccctgacgagcatctgcttgatgtgctgcccccgttctgctcgcgcaagggcggacgcctctgctggaccaacgagcccctgcgcggcgaggtggccaccagcgtggacctggtcaccctgcataatcgcggctggcgcgtcaggatcgtgcccgacgagcgcaccaccgtcttcccagaatggaagtgtgtcgcgcgcgagtatgtccagctcaacatcgcggccaaggagcgcgccgaccgtgacaaaaatcagaccatgagatccatcgccaagcttctctccaacgccctctatggctcctttgccaccaagcttgacaataaaaaaatagtcttttctgaccagatggatgaaagtctcctaaaaagcattgcggcagggcaggccaacatcaaatcctcctcgtttctagaaactgacaacctgagtgccgaggtcatgcccgctctcgagagggaatacctaccccaacagctggcgctcgtggacagcgacgcggaagagagtgaggacgagcacagacccgcccccttttatacccccccgtcggggacccccggtcacgtggcctacacctacaagccaatcaccttcttggatgcggaggagggggacatgtgtctgcacacggtggaaaaggtggaccccctggtggacaacgaccgctacccctcgcacgtggcctcctttgtcttggcgtggacgcgcgcctttgtctcagagtggtccgagtttctctacgaggaggaccgcgggacgcccctgcaggacaggccaatcaagtccgtctacggggacacagacagcctgtttgtcaccgaacgcggacacagactcatggagacgcgaggtaagaagcgcatcaaaaagaacgggggaaaactggtttttgaccccgagcagcccgagctcacctggctcgtcgagtgcgaaaccgtctgcgcccactgcggagcggacgccttcgctcccgagtccgtctttctcgcacccaagctctacgccctgcaatccctcctctgtcccgcctgcgggcgctcttccaaaggcaagctccgtgccaagggccacgccgccgaggcccttaactacaagctcatggtcaactgctatctcgccgacgcgcagggcgaagaccgtgcccgtttcagcaccagcaggatgagtctcaagcgcacccttgcaagcgcccagcccggggcccaccccttcaccgtgacggagaccaccctcactcggaccctgagaccctggaaggacatgacgctggccgcgctggacgcccatcgtctcgtgccctacagtcgcagtcgtcccaacccccgaaacgaggaagtctgctggatcgagatgccgtag

SEQ ID NO: 1298 - DNA, 1047 bp, Adenovirus D37
  MISC_FEATURE (1)..(1047): D37.orf00057 pIVa2 IVa2
atgcccatggccgacgggctcaagcccctgaaaaactttgcttccctgcaagagctgctctcgctgggcggggaccgcctcctcggcgagctcgtccgggaaaacctccaagtgagagacatgctcaacgaggtggcccccctcctccgggacgacggcagctgcatctccttgaactaccacctgcaacccgtcatcggggtcatctacggcccgaccgggtgcggcaagtcccagctgttaagaaacctgctctcctcgcagctcatcacccccgccccggaaaccgtttttttcatcgccccgcaggtggacatgatccccccctccgagatgaaagcctgggagatgcagatctgcgaggggaacttcgccccggggcccgagggaacgatcgtcccccaatctggcacccttcgccccaaattcattaaaatgtcttatgatgatctcacccaggagcataattatgatgtctctgaccccagaaacgtttttgccaaagccgcagcccacgggcccattgccatcatcatggatgagtgcatggaaaacctgggcgggcacaagggcgtctccaaattcttccacgcattcccttccaagttgcatgataagttccccaagtgcacgggctacaccgttctggtggtcctgcacaatatgaacccccggcgggatctgggtggcaacatcgccaacctcaagatccaggccaaactgcacatcatctccccccgcatgcatccctcccagcttaaccgctttgccaacacctacaccaaggggctccccgtggccatcagtctcctcctcaaggacatcatccagcaccacgcccagcgcccctgctatgactggattatctacaacacgaccccagagcacgaggccatgcagtggtgctacctccacccccgggacgggctcatgcccatgtacctcaacatccaatcccacctctaccgggtcctggaaaaaatccaccgcactctcaatgatcgggagaggtggaccagggcctaccgcgcgcgaaaaaataaataa

SEQ ID NO: 1299 - DNA, 405 bp, Adenovirus D37
  MISC_FEATURE (1)..(405): D37.orf00059 pIX pIXprotein
atgaacgggaccggcggggccttcgaaggggggctttttagcccttatttgacaacccgcctgccgggatgggccggagttcgtcagaatgtgatgggatctacggtggatgggcgtccagtgcttccagcaaattcctcgaccatgacctacgcgaccgtggggagctcgtcgcttgacagcaccgccgcagccgcggcagccgcagccgccatgacagcgacgagactggcctcgagctatatgcccagcagcggtagcagcccctctgtgcccagttccatcatcgccgaggagaaactgctggccctgctggccgagctggaagccctgagccgccagctggccgccctgacccagcaggtgtccgatctccgcgagcaacagcagcagcaaaataaatga

SEQ ID NO: 1300 - DNA, 1488 bp, Adenovirus D37
  MISC_FEATURE (1)..(1488): D37.orf00060 E1B 55 kDa protein
atggagccagaacacccaactgagcaggggctacattctggacttcgcagccatgcacctgtggagggcatgggtgaggcagcggggacagagaatcttgaactactggcttatacagccagcagctccgggtcttcttcgtctacacagacaaacatccatgttggaggaagaaatgaggcaggccatggacgagaacccgaggagcggcctggaccctccgtcggaagaggagctggattgaatcaggtatccagcttgtacccagagcttagcaaggtgctgacatccatggctaggggagtgaagagggagaggagcgatgggggcaataccgggatgatgaccgagctgacggccagcctgatgaatcgcaagcgcccagagcgcattacctggcacgagctacagatggagtgcagggatgagttgggcctgatgcaggataaatatggcctggagcagataaaaacacattggttgaacccagatgaggattgggaggaggccattaagaaatatgccaagatagccctgcgcccagattgcaagtacatagtgaccaagaccgtgaatattagacatgcctgctacatttcagggaacggggcagaggtggtcatcgataccctggacaaggccgccttcaggtgttgcatgatgggaatgagagcaggagtgatgaatatgaattccatgatcttcatgaacatgaagttcaatggagagaagtttaatggggtgctgttcatggccaacagccacatgaccctgcatggctgcagtttctttggcttcaacaatatgtgcgccgaggtctggggcgcttccaagatcaggggatgtaagttttatggctgctggatgggcgtggtcggaagacctaagagcgagatgtctgtgaagcagtgtgtgtttgagaaatgctacctgggagtctctaccgagggcaatgctagagtgagacactgctcttccctggatacgggctgcttctgcctggtgaagggtacggcctctctgaagcataatatggtgaagggctgcacagatgagcgcatgtacaacatgctaacatgcgactcgggggtctgtcatatcctgaagaacatccatgtgacctcccaccccagaaagaagtggccagtgtttgagaataacctgctgatcaagtgccatatgcacctgggtgccagaaggggcaccttccagccgtaccagtgcaactttagccagaccaagctgctgttggaaaacgatgccttctccagggtgaacctgaacggcatctttgacatggatgtctcggtgtacaagatcctgagatacgatgagaccaagtccagggtgcgcgcttgcgagtgcgggggcagacacaccaggatgcagccagtggccctggatgtgaccgaggagctgagaccagaccacctggtgatggcctgtaccgggaccgagttcagctccagtggggaggacacagattag

SEQ ID NO: 1301 - DNA, 207 bp, Adenovirus D37
  MISC_FEATURE (1)..(207): D37.orf00063 E1A early E1A 12S
gtgtcagaggatgagtcatcaccctcagaagaaaaccacccgtgtccccctgagctgtcaggcgaaacgcccctgcaagtgcacaaacccaccccagtcagacccagtggcgagaggcgagcagctgttgaaaaaattgaggacttgttacatgacatgggtggggatgaacctttggacctgagcttgaaacgccccaggaactag

SEQ ID NO: 1302 - DNA, 579 bp, Adenovirus D37
  MISC_FEATURE (1)..(579): D37.orf00065 E1A early E1A 13S
atgagacacctgcgcctcctgtcttcaactgtgcctattaacatggccgcattattgctggaggactatgtgagtacagtattggaggacgaactacatccatctccatttgagctgggacctacacttcaggacctttatgatttggaggtagatgcccatgatgacgacccaaacgaagaggctgtgaatttaatatttccagaatctctgattcttcaggctgacatagccagcgaagctgtacctacaccacttcatacaccgactttgtcacccatacctgaattggaagaggaggacgagttagacctccgatgttatgaggaaggttttcctcccagcgattcagaggacgaacagggtgagcagagcatggctctaatctcagaatatgcttgtgtggttgtggaagagcattttgtgttggacaatcctgaggtgcccgggcaaggctgtagatcctgccagtaccaccgggataagaccggagacacaaacgcctcctgcgctctgtgttacatgaaaaagaacttcagctttatttacagtaagtggagtgaatgtgagagaggctga

SEQ ID NO: 1303 - DNA, 378 bp, Adenovirus D69
  MISC_FEATURE (1)..(378): D69.orf00002 E4 ORF1 protein
atggctgaatctctgtatgcttttatagatagtcctggagggattgctcccgtccaggaagggactagcaatagatataattttttttgccctgaatctttccacattcctccgcatggggtggtattgcttcacctaaaagtgagtgtgctggttcctactggatatcagggcagatttatggccttgaatgactaccatgccagggacatactaacccagtccgatgtgatttttgccggaagaagacaggaacttactgtgctgctttttaatcacacggaccgatttttgtatgtccgcaagggccacccagtgggtaccctgttgctggagagagtgatttttccttcagtgaaaatagccaccttagtttag

SEQ ID NO: 1304 - DNA, 309 bp, Adenovirus D69
  MISC_FEATURE (1)..(309): D69.orf00003 E4 ORF2 protein
atgattaaagaaaaactaccacgctttatcacttacattttggaaggcatcaccggagacacaaagagagcttattccagcatgcagtttttgggtgctagctttggagcattaaagttttcccttacgcttgccagtcccacgcttagccctggctctgaattgtcagctgtagtggcccaggacttaagtgactttttgcagctgacattgaggcgcgagctcagggcggagggcagaaccttattgaatcttgttgttttgaacacgctgcaggtggtggagcagcaggatctgtttctattatga

SEQ ID NO: 1305 - DNA, 354 bp, Adenovirus D69
  MISC_FEATURE (1)..(354): D69.orf00005 E4 13.6 K E4 ORF 3 13.6 kDa protein
atgaaggtctgcctgattatgaaagtggagggggcactgtgggagcttttccacatgtgcggagtggacttacaccaacaatttgtagagataatccaaggctggaaaaatgagaattacctggggatggtgcaggaatgtaacctgatgattgatgaaatcgatggagggccagcctttaatgtgattcttatgctggatgtacgcgtagagccactgctcgaagccacggtcgagcaccttgaaaatagagtgggttttgacctggctgtctgtttccaccagcacagcggcggggaacgctgtcacctgcgtgacttgcactttatcgtccttcgagaccgtttggaataa

SEQ ID NO: 1306 - DNA, 663 bp, Adenovirus D69
  MISC_FEATURE (1)..(663): D69.orf00007 E4 34.1 kDa protein
atgatcttgactccagaggaaataaaaattttaaaaagatgtatgtcagtgtgcctgtgccccgctaccctggacttggtgagagctcagatggtgagcgggtacgagcgctggatcctgcattgccactgttcatccccgggctccctgcagtgtcgggcgggaggcaccctgctggccgtgtggttcaggagagtcatttacgggtgcatgttcaaccagcgtttcccatggtaccgtcagattgtgaacagagacatgcccaaagagatcatgtatatgggcagtgtgttcatgaggggcaggcacctgatatactgccgcatctggtacgatggtcacgtgggttccatcatccccaacatgagttttggctggagcaccctgaattatggtctgctgaataacatggtgattatgtgctgcacttactgtgagaacatgagcgagatcaggatgcggtgctgtgcccgacgcaccaggagactgatgctgaaggctgtggggatcatagtcagagagacttgtgatcccgatcccatctgcagcagccgcaccgagccccggcggcagagactgctgagggcgctgatggagaggcacagacccatcctgttttccgaatatgaatctgtgcgttcttctcattccactagactgtga

SEQ ID NO: 1307 - DNA, 246 bp, Adenovirus D69
  MISC_FEATURE (1)..(246): D69.orf00008 E4 ORF6/7 protein
gtgaccttggactgtgaggcccgcttggatgacttttcagaggacggcttcatctcaatcaccgacccccgtttggctcgccaggaaactgtgtggattatagaccccaagtccagttcccgcactaatcagaacatttccctatttaaggccacccgtgctgagagaatcgtgtacactgtgaaatgggctggtggtgggagactgactacccgtgctggtgtaaaaatcaataaagatacataa

SEQ ID NO: 1308 - DNA, 1116 bp, Adenovirus D69; identical to SEQ ID NO: 158
  MISC_FEATURE (1)..(1116): D69.orf00009 L5 fiber

SEQ ID NO: 1309 - DNA, 150 bp, Adenovirus D69
  MISC_FEATURE (1)..(150): D69.orf00010 U protein
atgaaaattgtggaccaggaatttgacatccctttcaaggtgtggagaaagttcgccgcccgccggggactggagtaccagagctgggaggagggtaccgaggtgctgctaaacaactacaccagagacatactttcagatttcaagtaa

SEQ ID NO: 1310 - DNA, 393 bp, Adenovirus D69
  MISC_FEATURE (1)..(393): D69.orf00011 E3 14.7 kDa protein
atgactgacaaccacctggacctcgagatggacggccaggcctccgagcagcgcatcctgcaactgcgcgtccgtcagcagcaggagcgggccgccaaggagctcctcgatgccatcaacatccaccagtgcaagaagggcatcttctgcctggtcaaacaggcaaagatcacctacgagctcgtgtccggcggcaagcagcatcgcctcgcctatgagctgccccagcagaagcagaagttcacctgcatggtgggcgtcaaccccatagtcatcacccagcagtcgggcgagaccagcggctgcatccactgctcctgcgaaagccccgagtgcatctactccctcctcaagaccctttgcggacttcgcgacctcctccccatgaactga

SEQ ID NO: 1311 - DNA, 390 bp, Adenovirus D69
  MISC_FEATURE (1)..(390): D69.orf00013 E3 RID-beta
atgcagactctgctcatactgctatccttcctctcccctgccctcgctgatgatgattactctaagtgcaaatttgtggagctatggaatttcttagactgctatgatgctaaaatggatatgccatcctattacttggtgattgtggggatagtcatggtctgctcctgcactttctttgccatcatgatctacccctgttttgatctcggctggaactctgttgaggcattcacatacacactagaaagcagttcactagcttccacgccgccacccacaccgcctccccgcagaaatcagtttcccatgattcagtacttagaagagccccctccccggcccccttccactgttagctactttcacataaccggcggcgatgactga

SEQ ID NO: 1312 - DNA, 276 bp, Adenovirus D69
  MISC_FEATURE (1)..(276): D69.orf00014 E3 RID-alpha
atgattcctaggttcttcctatttaacatcctcttctgtctattcaacgtgtgcgctgccttcgcggccgtctcgcacgcctcgcccgactgtcttgggcccttccccacctaccttctttttgccctgctcacctgcacctgcgtctgcagcattgtctgcctggtcgtcaccttcctgcagctcatcgactggtgctgcgcgcgctacaattatctccaccacagtcccgaatacagggacgagaacgtagccagaatcttaaggctcatttga

SEQ ID NO: 1313 - DNA, 852 bp, Adenovirus D69
  MISC_FEATURE (1)..(852): D69.orf00016 E3 CR1-gamma
atgaaggctttcacagcttgcgttctgattagcatagtcacattagtatcagctgattacaaacaagttcaagttagcagaggaggaaatattacattagatggaccattcgataatactacatggacaagatatcataatgatggacataaaaatggttggatgaaaatttgcacatggactggagcaacatataaatgtcacaataatggaagcattactatttttgctttcaacattacatccggagtttacaaagcagaagggtataaaaaagaggttagaacattttcatctagaaatcaaaaacatacaattgaagattctggagattatgaacaacaaaaaatatatctatataatctaacaataattgaagcgccaactactaaagcacccaccacagttagaacaaccacgcagacaactactagggaaacaacacatccaaccaccacagtcagtacaactcacactacacatctagacactacagtgcagaatactactttattgattgggtttttactaagaggaaatgaaagtactactgatcagacagaggctacctcaagtgccttcagcagcactgcaaatttaacttcgcttgcttcggtaaatgaaacgatcgtgccgatgatgtatggccaaccttactcaggtttggatattcaaattacttttctggttgtctgtgggatctttattcttgtggttcttttgtactttgtctgctgcaaagccagagaaaaatctaggaggcccatctacaggccagtaatcggggatcctcagcctctccaagtggaagggggtctaaggaatcttctcttctctttttcagtatggtga

SEQ ID NO: 1314 - DNA, 1269 bp, Adenovirus D69
  MISC_FEATURE (1)..(1269): D69.orf00017 E3 CR1-beta
atgaatactttgaccagtgtcgtgctgctctctcttcttgtagcttttagtcaggcaggatttcatactatcaatgctacatggtgggctaatgtaactttagtgggaccctcagatacgccagtcacatggtatgataaacagggaatgcagttctgtgatggaaatacagttaagaatcctcaaataagacatgagtgtaatgagcaaaaccttacactaattcatgtgaacaaaacccatgaaaggacatacatgggttataatagacagagtactcataaggaagactataaagtcatagttataccgcctcctcctgctactgtaaagccacagtcaggtccagagtatgtatatgttaatatgggagagaacaaaaccttagttggacctccaggaataccagttacttggtatgacggagaaggaaataaattctgcgatggagaaaaagttgaacatgcagaatttaatcatacatgtgacgagcaaaatcttacactgttgtttataaatcttacacatgatggggcttatcttggctataatcaccagggaactaaaagaacttggtatgaggttgtagtgacagatggttttccaaaatcaggggagatgaaaatcgaagatcagagtagacaaacagaacaaaaacaaaatgagcataaacagggtgggcagaaacaggaggggcaaaaagagacaagtcaaaagaaagataatgacaaacagaaggcgacacacaggaggccatcaaaactaaagccgcacacacctgaagcaaaactgattacagtttctagtgggtctaacttaacattacttgggccagatggaaaggtcacttggtatgatgatgatttaaaaagaccatgcgagcctgggtataagttagggtgtaagtgtgacaatcaaaacctaacgctaatcaatgtaactaaactttatgagggagtttactatggtactaatgacagaggtaacagcaaaagatacagattaaaagtaaacactactaattctcaaagtgtgaaaattcagccatacaacaggtctactactcctgatcagaaacacagatttgaattgcaaattgattctaatcaagacaatgacaaaattccatcaaccactgtggcaatcgtggtgggagtgattgcgggcttcataactataatcattgtcattctgtgctacatctgctgccgcaagcgtcccagggcatacaatcatatggtagacccactacttagcttctcttactga

SEQ ID NO: 1315 - DNA, 306 bp, Adenovirus D69
  MISC_FEATURE (1)..(306): D69.orf00018 E3 gp 17.5 kDa protein
atgggaaattcatgggtgggcgattgggaaccaggagatgagcagaactacacggtcactgtccatggtagcgatgggaatcacactttcggtttcaaattcatttttgaagtcatgtgtgatatcacactgcatgtggctagacttcatggcttgtggccccctaccaaggagaacatggttgggttttctttggcttttgtgatcatggcctgctttatgtcaggtctgctggtaggggctttagtatggttcctgaagcacaagcctaggtatggaaatgaggagaaggaaaaattgctataa

SEQ ID NO: 1316 - DNA, 570 bp, Adenovirus D69
  MISC_FEATURE (1)..(570): D69.orf00019 E3 CR1-alpha
gtgctgagtttaataaaagctaaactcctacaatactctgggatcccgtgtcgtcgcactcgcaacgagatcttcaacctcaccaaccagactgaggtaaaactcaactgcagaccggggggcaaatacatcctctggctctttgaaaacacttccttcgcagtctccaacgcctgcgccaacgacggtattgaaatacccaacaaccttaccagtggactaacttacactaccagaaagactaagctagtactctacaatccttttgtagagggaacctaccactgccagagcggaccttgcttccacactttcactttggtgaacgttaccgacagcagcacagtcgctccagaaacatctaacctttttgatactaacactcctaaaaccggaggtgagctctgggttccctctttaacagaggggggtaaacatattgaagcggttgggtatttgattttaggggtggtcctgggtgggtgcatagcggtgctgtattaccttccttgctggatcgaaatcaaaatctttatctgctgggtcatacattgttgggaggaaccatga

SEQ ID NO: 1317 - DNA, 321 bp, Adenovirus D69
  MISC_FEATURE (1)..(321): D69.orf00020 E3 12.2 kDa protein
atgtcccatgctgactcggctgagctcgctcggttgaggcatctggaccactgccgccgcctgcgctgcttcgcccgggagagctgcggactcatctactttgagtttcccgaggagcaccccaacggccctgcgcacggagtgcggatcaccgtagagggcaccgccgagtctcacctggtcaggttcttcacccagcaacccttcctggtcgagcgggaccggggcgccaccacctacaccgtctactgcatctgtcctaccccgaagttgcatgagaatttttgttgtactctgtgtgctgagtttaataaaagctaa

SEQ ID NO: 1318 - DNA, 684 bp, Adenovirus D69
  MISC_FEATURE (1)..(684): D69.orf00021 L4 pVIII
atgagcaaggagattcccaccccttacatgtggagctatcagccccagatgggcctggccgcgggcgcctcccaggactactccacccgcatgaactggctcagtgccggcccctcgatgatctcacaggtcaacggggtccgtaaccatcgaaaccagatattgttggagcaggcggcggtcacctccacgcccagggcaaagctcaacccgcgtaattggccctccaccctggtgtatcaggaaatccccgggccgactaccgtactacttccgcgtgacgcactggccgaagtccgcatgactaactcaggtgtccagctggccggcggcgcttcccggtgcccgctccgcccacaatcgggtataaaaaccctggtgatccgaggcagaggcacacagcttaacgacgagttggtgagctcttcaatcggtctgcgaccggacggagtgttccaactagccggagccgggagatcctccttcactccccaccaggcctacctgaccttgcagagcagctcttcggagcctcgctccggaggcatcggaaccctccagttcgtggaggagtttgtgccctcggtctacttcaaccccttctcgggatcgccaggcctctacccggacgagttcataccgaacttcgatgcagtgagagaagcggtggacggctacgactga

SEQ ID NO: 1319 - DNA, 219 bp, Adenovirus D69; identical to SEQ ID NO: 912
  MISC_FEATURE (1)..(219): D69.orf00022 L4 20 kDa protein

SEQ ID NO: 1320 - DNA, 186 bp, Adenovirus D69; identical to SEQ ID NO: 949
  MISC_FEATURE (1)..(186): D69.orf00023 L4 22 kDa protein

SEQ ID NO: 1321 - DNA, 2172 bp, Adenovirus D69
  MISC_FEATURE (1)..(2172): D69.orf00025 L4 100 kDa protein
atggaggagcagccgcgtaagcaggagcaggaggaggacttaaccacccacgagcaacccaaaatcgagcaggacctgggcttcgaagagccggctcgtctagaacccccacaggatgaacaggaggagaccgacgctgggctcgagcatggctacctgggaggagaggaggatgtgctgctgaaacacctgcagcgccagtccatcatcctccgggacgccctggccgaccggagcgaaacccccctcagcgtcgaggagctaagtagggcctacgagctcaacctcttctcgccgcgcgtgccccccaaacgccagcccaacggcacatgcgagcccaacccgcgtctcaacttctaccccgtctttgcggtccccgaggccctcgccacctatcacatctttttcaagaaccaaaagatccccgtctcctgccgcgccaaccgcacccgcgccgacgcgctcctcgctttggggcccggcgcgcgcatacctgatatcgcttccctggaagaggtgcccaagatcttcgaagggctcggtcgggacgagacgcgcgcggcgaacgctctgaaagaaacagcagaggaagagggtcacactagcgccctggtagagttggaaggcgacaacgccaggctggccgtgctcaagcgcagcgtcgagcttacccacttcgcctaccccgccgtcaacctcccgcccaaggtcatgcgtcgcatcatggatcagctcatcatgccccacatcgaggccctcgatgaaagtcaggagcagcgccccgaggacgcccggcccgtggtcagcgacgagatgctcgcgcgctggctcgggacccgcgacccccaggctttggaacagcggcgcaaactcatgctggccgtggtcctggtcacccttgagctcgaatgcatgcgccgctttttcagcgaccccgagaccctgcgcaaggtcgaggagaccctgcactacactttcaggcacggtttcgtcaggcaggcctgcaagatctccaacgtggagctgaccaacctggtctcctgcctggggatcctgcacgagaaccgcctgggccagaccgtgctccactctaccctgaagggcgaggcgcggcgggactatgtccgcgactgcgtctttctctttctctgccacacatggcaagcggccatgggcgtgtggcagcagtgtctcgaggacgagaacctaaaggagctggacaagcttcttgctagaaaccttaaaaagctgtggacgggcttcgacgagcgcaccgtcgcctcggacctggccgagatcgtcttccccgagcgcctgagacagacgctgaaaggcgggctgcccgacttcatgagccagagcatgttgcaaaactaccgcactttcattcttgagcgatcaggcatcctgcccgccacctgcaacgccttcccctccgactttgtaccgctgagctaccgcgagtgtcccccgccgctgtggagccactgctacctcttgcagctggccaactacatcgcctaccactcggacgtgatcgaggacgtgagcggcgaggggctgctcgagtgccactgtcgctgcaacctgtgctccccgcatcgctccctggtctgcaacccccagctcctgagcgagacccaggtcatcggtaccttcgagctgcaaggtccgcaggagtccaccgctccgctgaaactcacgccggggttgtggacttccgcgtacctgcgcaaatttgtacccgaagactaccacgcccatgagataaagttctttgaggaccaatcgcgtccgcagcacgcggatctcacggcctgcgtcatcacccagggcgcgatcctcgcccaattgcacgccatccaaaaatcccgccaagagtttcttctgaaaaagggtagaggggtctacctggacccccagacgggcgaggtgctcaacccgggtctcccccagcatgccgaggaagaagcaggagccgctagtggaggagatggaagaagaatgggacagccaggcagaggaggacgaatgggaggaggagacagaggaggaagaattggaagaggtggaagaggagcaggcaacagagcagcccgtcgccgcaccatccgcgccggcagccccgccggtcacggatacaacctccgctccggtcaagcctcctcgtag

SEQ ID NO: 1322 - DNA, 1473 bp, Adenovirus D69
  MISC_FEATURE (1)..(1473): D69.orf00027 E2A DNA-binding protein
atggccggcggcagtcaggacgtgcgccggttcatggagcgagaggccactccgccccggggccacgggtcggcgcgctatccgccggagcaggagaggagcccctcgccgccaccacctcctctgcccaccaagcgccgaaagtatcagcgggtgggctccgggtcttccgaggaggacgtggttcccgtggacagccctccaaaaaagaagcaagccaggaagaccaagcatgtgaccaaggtagaccccgacgaagagatgccccaggaagatgccgtgatcgtgggagtgggattcagccagccgccggttctgttgaaggaaggcaaggacggaaaacgcatcgtcgagcccgcgacacccggtgtcctgaacgtgcgcaaccccctgagtctgcctctggtctcgtcctgggagaagggcatggataccatgaacgtgctgatggaacgttaccgcgtcgacagcggcctgcgcgatgcttacaagctcatgcccgagcagaccgagatcttccaaaagatgtgccagacctggatgaacgaggaggcccgcggtctgcaactgaccttcaccactcagaaaacctttagcaccataatgggccgcatgttgcaaggttacatcttcagccacagcgggatcgcgcacaagaactgggagtgcaccggctgcgccctgtgggaccacggctgcaccgaggtggaaggtcagctcaagtgtctgcatggaacggtgatgatccacaaggaccacgtggtggagatggatgtgaccagtgagaacgggcagcgcgcgttgaaggagcaacccagcaaggccaaggtgacccagaaccgctggggccggagcgtggtgcaactgaccagccatgacgcgcgctgctgcgtgcaggatgccggatgcgggaataaccagttcagcgggaagagctgcggcctgtttttcagcgagggggccaaggcccagcaagctttcaagcagatcgcggcctttgtcaaggccctctacccgaatatgcagcgcggcgcgggaatgatgctaatgcccgttcactgcgagtgtaaccacaagcctcagagcgtgcccttcctgggccgccagctgtgcaagatgaccccgttcggcctgagcaacgccgaggacctggacaaggatcagatcagcgacaagagcgtgcttgccagtgtgaagtaccccagtctgatggtgttccagtgctgcaaccccgtgtaccgcaactcgcgcgcgcaaagcaccggccccaactgcgatttcaagatctccggcccggacatgctgggcgccctgcagatgagccggcgcatgtggagcgagaccttccccgagaccccagtgcccaaactggtgatccccgagttcaagtggcagcccaagtaccagtaccgcaacgtggccctccccagcgcggcgcacaacgacgagcgcgagaacccctttgacttttaa

SEQ ID NO: 1323 - DNA, 630 bp, Adenovirus D69
  MISC_FEATURE (1)..(630): D69.orf00028 L3 protease
atgagcggctccagcgaacgagagctcgcggccatcgtgcgcgacctgggctgcgggccctactttttgggcacccacgacaagcgcttcccgggctttctcgccggcgacaagctggcctgcgccatcgtcaacacggccggccgcgagaccggaggcgtgcactggctcgcctttggctggaacccgcgctcgcgcacctgctacatgttcgacccctttgggttctcggaccgccggctgaagcagatttacagcttcgagtacgaggccatgctacgccgcagcgccctggcctcctcgcccgaccgctgtctcagcctcgagcagtccacccagaccgtgcaggggcccgactccgccgcctgcggacttttctgttgcatgttcttgcatgccttcgtgcactggcccgaccgacccatggacggaaaccccaccatgaacttgctgacgggggtgcccaacggcatgctacaatcgccacaggtgctacccaccctccggcgcaaccaggagcagctctaccgcttcctcgcgcgccactccccttactttcgatcccaccgcgccgccatcgaacacgccaccgcttttgataaaatgaaacaactgcgtgtatctcaataa

SEQ ID NO: 1324 - DNA, 2856 bp, Adenovirus D69; identical to SEQ ID NO: 218
  MISC_FEATURE (1)..(2856): D69.orf00031 L3 hexon

SEQ ID NO: 1325 - DNA, 705 bp, Adenovirus D69
  MISC_FEATURE (1)..(705): D69.orf00032 L3 pVI
atggaagacatcaattttgcgtccctggctccgcggcacggcacgcggccgttcatgggcacctggaacgagatcggcaccagccagctgaacgggggcgccttcaattggagcagtgtctggagcgggcttaaaaatttcggctcgacgctccggacctatgggaacaaggcctggaatagtagcacggggcagttgttaagggaaaagctcaaagaccagaacttccagcagaaggtggtggacgggctggcctcgggcattaacggggtggtggacatcgcgaaccaggccgtgcagcgcgagataaacagccgcctggacccgcggccgcccacggtggttgagatggaagatgcaactcttccgccgcccaagggcgaaaagcggccgcggcccgacgcggaggagacgatcctgcaggtggacgagccgccctcgtacgaggaggccgtgaaggccggcatgcccaccacgcgtatcatcgcgccgctggccacgggtgtaatgaaacccgccacccttgacctgcctccaccacccacgcccgctccaccgaaggcagctccggttgtgcaggcccccccggtggcgaccgccgtgcgccgcgtccccgcccgccgccaggcccagaactggcagagcacgctgcacagtatcgtgggcctgggagtgaaaagtctgaagcgccgccgatgctattga

SEQ ID NO: 1326 - DNA, 225 bp, Adenovirus D69
  MISC_FEATURE (1)..(225): D69.orf00033 L2 pX core protein L2 pX
atggctctcacttgccgcctgcgcatccccgtcccgaattaccgaggaagatcccgccgcaggagaggcatggcaggcagcggcctgaaccgccgccggcggcgggccatgcgcaggcgcctgagtggcggctttctgcccgcgctcatccccataatcgccgcggccatcggcacgattccgggcatagcttccgttgcgctgcaggcgtcgcagcgccgttga

SEQ ID NO: 1327 - DNA, 999 bp, Adenovirus D69
  MISC_FEATURE (1)..(999): D69.orf00035 L2 pV
atgtcaaagcgcaaaatcaaggaggagatgctccaggtcgtcgccccggagatttacggacccccggaccagaaaccccgcaaaatcaagcgggttaaaaaaaaggatgaggtggacgagggggcagtagagtttgtgcgcgagttcgctccgcggcggcgcgtaaattggaaggggcgcagggtgcagcgcgtgttgcggccaggcacggcggtggtgttcacgcccggcgagcggtcctcggtcaggagcaagcgtagctatgacgaggtgtacggcgacgacgacatcctggaccaggcggcggagcgggcgggcgagttcgcctacgggaagcggtcgcgcgaagaggagctgatctcgctgccgctggacgaaagcaaccccacgccgagcctgaagcccgtgaccctgcagcaggtgctgccccaggcggtgctgctgccgagccgcggggtcaagcgcgagggcgagagcatgtacccgaccatgcagatcatggtgcccaagcgccggcgcgtggaggacgtgctggacaccgtgaaaatggatgtggagcccgaggtcaaggtgcgccccatcaagcaggtggcgccgggcctgggcgtgcagaccgtggacattcagatccccaccgacatggatgtcgacaaaaaaccctcgaccagcatcgaggtgcagaccgacccctggctcccagcctccaccgctaccgtctccacttctaccgccgccacggccaccgagcctcccaggaggcgaatatggggcgccgccagccggctgatgcccaactacgtgttgcatccttccatcatcccgacgccgggctaccgcggcacccggtactacgccagccgcaggcgcccagccagcaaacgccgccgccgcaccaccacccgccgccgtctggcccccgcccgcgtgcgccgcgtaaccacgcgccggggccgctcgctcgttctgcccaccgtgcgctaccaccccagcatcctttaa

SEQ ID NO: 1328 - DNA, 588 bp, Adenovirus D69
  MISC_FEATURE (1)..(588): D69.orf00036 L2 pVII
atgtctattctcatctcgcccagcaataacaccggctggggtcttactaggcccagcaccatgtacggaggagccaagaagcgctcccagcagcaccccgtccgcgtccgcggccacttccgcgctccctggggcgcttacaagcgcgggcggacttctaccgccgccgccgtgcgcaccaccgtcgacgatgtcatcgactcggtggtcgccgatgcgcgcaactatacccccgccccctccaccgtggacgcggtcatcgacagcgtggtggccgacgcgcgcgactatgccagacgcaagagccggcggcgacgaatcgccaggcgccaccggagtacgcccgccatgcgcgccgcccgggctctgctgcgccgcgccagacgcacgggccgccgggccatgatgcgagccgcgcgccgcgccgccactgcaccccccgcaggcaggactcgcagacgagcggccgccgccgccgccgcggccatttctagcatgaccagacccaggcgcggaaacgtgtactgggtgcgcgactccgtcacgggcgtgcgcgtgcccgtgcgcacccgtcctcctcgtccctga

SEQ ID NO: 1329 - DNA, 1560 bp, Adenovirus D69; identical to SEQ ID NO: 188
  MISC_FEATURE (1)..(1560): D69.orf00038 L2 penton

SEQ ID NO: 1330 - DNA, 1695 bp, Adenovirus D69
  MISC_FEATURE (1)..(1695): D69.orf00041 L1 pIIIa
atgtcccagcaagccccggaccccgccataagggcggcgctgcaaagccagccgtccggtctagcatcggacgactgggaggccgcgatgcaacgcatcatggccctgacgacccgcaaccccgagtcctttagacaacagccgcaggccaacagactttcggctattctggaggcggtggtcccctctcggaccaaccccacgcacgagaaggtgctggcgatcgtgaacgcgctggcggaaaacaaggccatccgtcccgacgaggccgggctggtgtacaacgccctgctggagcgcgtgggccgctacaacagcacgaacgtgcagtccaacctggaccggctggtgacggacgtgcgcgaggccgtggcgcagcgcgagcggttcaagaacgagggcctgggctcgttggtggcgctgaacgccttcctggcgacgcagccggcgaacgtgccgcgcgggcaggacgattataccaactttatcagcgcgctgcggctgatggtgaccgaggtgccccagagcgaggtgtaccagtcgggcccggactactttttccagactagcagacagggcctgcagacggtgaacctgagccaggctttcaagaatctgcgcgggctgtggggcgtgcaggcgcccgtgggcgaccggtcgacggtgagcagcttgctgacgcccaactcgcggctgctgctgctgctgatcgcgcccttcaccgacagcggcagcgtgaaccgcaactcgtacctgggtcacctgctgacgctgtaccgcgaggccataggccaggcgcaggtggacgagcagaccttccaggagatcactagtgtaagccgcgcgctgggtcagaacgacaccgacagtcttagagccaccctgaacttcttgctgacaaatagacagcagaagattccggcgcagtacgcgctgtcggccgaggaggagcgcatcctgagatatgtgcagcagagcgtagggcttttcctgatgcaggagggggccacccccagcgccgcgctggacatgaccgcgcgcaacatggaacctagcatgtacgccgccaaccggccgtttatcaataagctgatggactacctgcaccgcgcggcgtccatgaactcggactactttaccaatgccattttgaacccgcactggctcccgccgccggggttctacacgggcgagtacgacatgcctgaccccaacgacgggtttttgtgggacgacgtggacagcgcggtgttctcaccgaccttgcaaaagcgccaggaggcggtgcgcacgcccgcgagcgagggcgcggtgggtcggagcccctttcctagcttagggagtttgcatagcttgccgggctcggtgaacagcggcagggtgagccggccgcgcttgctgggcgaggacgagtacctgaacgattcgctgctgcagccgccgcgggtcaagaacgccatggccaataacgggatagagagtttggtggacaaactgaaccgctggaagacctacgctcaggaccatagggagcctgcgcccgcgccgcggcgacagcgccacgaccggcagcggggcctggtgtgggacgacgaggactcggccgacgatagcagcgtgttggacttgggcgggagcggtggggtcaacccgttcgcgcatctgcagcccaaactggggcggcggatgttttga

SEQ ID NO: 1331 - DNA, 129 bp, Artificial Sequence
  D69.orf00043 hypothetical protein
gtgaccaagtcccgctcgccgcggccgtccgcgaaccgggttctgccgcgactcaaccctggcgatgcttctccagactacgggcgcgagccactgcccgacagggttttcggccgctttcaagtctag

SEQ ID NO: 1332 - DNA, 1125 bp, Adenovirus D69
  MISC_FEATURE (1)..(1125): D69.orf00044 L1 52 kDa protein
atgcatcccgtcctgcgccaaatgcgtcccacccccccggcgaccaccgcgaccgcggccgtagcaggcgccggcgctagccagccacagccacagacagagatggacttggaagagggcgaagggctggcgagactgggggcgccgtccccggagcgacacccccgagtgcagctgcagaaggacgtgcgcccggcgtacgtgcctgcgcagaacctgttcagggaccgcagcggggaggagcccgaggagatgcgcgactgccggtttcgggcgggcagggagctgcgcgagggcctggaccgccagcgcgtgctgcgcgacgaggatttcgagccgaacgagcagacgggcatcagccccgcgcgcgctcacgtggcggcggccaatctggtgacggcctacgagcagacggtgaagcaggagcgcaacttccaaaagagtttcaacaaccacgtgcgcaccctgatcgcgcgcgaggaggtggccctgggcctgatgcacctgtgggacctggcggaggccatcgtgcagaacccggacagcaagcctctaacggcgcagctgttcctggtggtgcagcacagcagggacaacgaggcgttcagggaggcgctgctgaacatcgccgagcccgagggtcgctggctgctggagctgatcaacatcttgcagagcatcgtagtgcaggagcgcagcctgagcctggccgagaaggtggcggcgatcaactactcggtgttgagcctcggcaagttttacgcgcgcaagatttacaagacgccgtacgtgcccatagacaaggaggtgaagatagacagcttttacatgcgcatggcgctcaaggtgctgacgctgagcgacgacctgggcgtgtaccgcaacgaccgcatccacaaggccgtgagcacgagccggcggcgcgagctgagcgaccgcgagctcatgctgagtctgcgccgggcgctggtagggggcgccgccggcggcgaggagtcctacttcgacatgggggcggacctgcattggcagccgagccggcgcgccttggaggccgcctatggtccagaggacttggatgaggaagaggaagaggaggaggatgcacccgttgcggggtactga

SEQ ID NO: 1333 - DNA, 1854 bp, Adenovirus D69
  MISC_FEATURE (1)..(1854): D69.orf00047 pTP
atggactatttcctgccgctgcgcaacatctggaaccgcgtccgcgagttcccgcgcgcctccaccaccgccgccggcatcacctggatgtcccgctacgtctacggctaccaccgcctcatgctcgaggacctggccccgggcgcgccggccacccagcgctggccgctctaccgccagccgccgccgcactttctagtcggataccagtacctcgtgcgcacctgcaacgactacgtattcgactcgcgcgccttctcgcggctcaggtactcggaggtcgtgcagcccggcttgcagaccgttaactggtcgctcatggccaactgcacctacaccatcaacacaggggcctaccaccgcttcgtcgacatggacgacttccaggacaccctcacccgcgtgcaacaggccatcctcgccgagcgcgtcgtcgccgacctggcgctcgtgcagccgctcaggggcgtcggggtcacccgcatggaagactctgcctccgccagtgatgacattgaaaggctcatgcatgactactacaagaacctgagccggtgtcagggccaggcctggggcatggccgagcggctccgcatccagcaagcgggacccaaggacctggtcctcctcgccaccatccgccgcctcaaaaacgcctacttcaattacatcatcagcaaccgcaattctaacagcgtccacagggctgctacgtgtttgagcttaccttgcgactgcgattggctagacgctttcctcgaaagattctccgatccggtcgatctcgacgcgctcacgtcccctacaccgcaattgataagatgcatcgtcagcgccctctcgctgcccaacggggacccgccccattaccgggagatgaccggcggcgtcttcacgctgcgtcctcgcgaacggggtcgcgccgtcaccgaaaccatgcgtcgccgccgcggggagatgatcgagcgcttcgtcgaccgtctcccggtgcgtcgccgtcgtcgtcgcgccccgccaccaccaccgcccccagaggaagaaatagaagaagaggtcgtcatggaagaagaggaagaggaggaggcccccggggatttcgagcgcgaggtgcgcgccaccatcgccgagctcatccggctcctggaagacgagctcacggtctcggcccgcaacgcccagtttttcaacttcgccgtggacttctacgaggccatggaaaggctggaggccatcggcgacatcagcgagatgcccctgcgccgctggatcatgtacttcttcgtcaccgagcacatcgccaccaccctcaactacctcttccaacgcctgcgcaactacgctgtcttcacgcgccacgtggagctcaacctagcgcaggtggtcatgcgcgcgcgcgacgccgacggggacgtggtctacagccgcgtctggaacgagagcggcctgggcgccttctcgcagctcatgggtcgcatctccaacgacctcgccgccaccgtcgagcgcgcgggccgcggcgatctccaggaggaggagatcgagcagttcatgtccgagatcgcctaccaggacaactcgggcgacgtgcaagagatcctgcgtcaggccgccgtcaatgacgccgagattgattctgttgaactgtctttcaggttcaaagtcacggggccagtggtcttcacacagaggcggcagatccaggatgtcaaccgccgcgtcgtcgcgcacgccagcgctctcagggcgcagcaccgggacctgcccgagcgccacgccgaagtgcctctgccgcccctgcccgcggggccggaaccgccgctgccgccgggagcgcgtccgcgacaccgcttctaa

SEQ ID NO: 1334 - DNA, 3300 bp, Adenovirus D69
  MISC_FEATURE (1)..(3300): D69.orf00048 E2B DNA polymerase
gtggccccgcgcagctacgggctcatgcaatgcgtggacacggccaccaactcacccgtagaaatcaagtaccatctgcatctcaagcacgccctcacccgcctctacgaggtcaacctcagaaccctgccccctgacctggatctccgcgacaccatggacagctcccaactgcgcgcccttgtcttcgctctccgcccccgccgcgccgagatctggacctggctcccgcgcgggctcgtcagcctctccgtcctcgaggagccccagggtgagtcccacgcaggcgaacatgaaaaccaccagccagggccgccactcctgaagttcctcctcaagggacgcgctgtgtatctcgtggatgaggtacagcccgtgcagcgctgcgagtactgcggacgcttttacaagcatcagcatgagtgctcggttcgccggcgggatttctactttcatcacatcaacagccactcgtccaactggtggcaggaaatccagttcttcccaatcggctctcatcctcgcacggagcggctctttgtcacctacgatgtagaaacctacacctggatggggtccttcggcaagcagctcgtccccttcatgctggtcatgaaattctcgggggaccccgagctggtcgccctcgctcgcgatctcgccgtgcgcttacgctgggatcgctgggagcgtgaccccctcaccttctactgcgtcaccccagaaaagatggccgtgggccagcagttccgcctctttcgcgacgagctccagaccctcatggcccgcgagctctgggcttccttcatgcaagccaacccacatctccaggagtgggcgctcgagcagcacggcctgcaatgccccgaggacctcacctacgaggaactcaaaaagctgccgcacatcaaaggccgcccgcgattcatggaactctacatcgtcgggcacaacatcaacggcttcgacgagatcgtcctcgccgcccaggtcatcaacaaccgagcctccgtcccgggccctttccgcatcacccgcaatttcatgccgcgggcaggcaagattctcttcaatgacgtcactttcgctctgcctaaccccctctcgaagaagcgcaccgatttcgagctctgggagcacggcggctgcgacgactcggacttcaagtaccagttcttgaaagtcatggtcagggacaccttcgccctgacgcacacctcgctccgcaaggccgctcaagcttacgccctccccgtggagaagggctgctgtccctacaaggccgtgaaccatttctacatgctgggctcttaccgtgcggacgatcgaggattcccgctccgggagtactggaaggatgacgaggagtacgccctcaaccgcgagctatgggagaagaaaggagaggcgggttatgacatcatccgcgaaacactggactactgcgccatggacgtcctcgtcaccgccgagctcgtcgccaagctgcaagactcctacgcgcacttcatccgcgactcggtccgcctgccccacgcccactttaacatcttccaacggcccaccatctcctcaaactcgcatgccatctttcgccagatcgtcttccgcgccgagcagccccagcgcaccaatctcggccccgccttcttggccccctcgcacgagttgtatgactacgtgcgcgccagcatccgcggggggcgctgttatcccacctacatcggcatcctctcggagcccatctatgtctacgacatctgcggcatgtacgcctccgccctcacacatcccatgccttggggtccgcccctcaacccctacgagcgagcgctggccgcccgcgagtggcagatggccttggatgatgcatcctcaaaaatcgattattttgacaaggaactctgtccgggcatcttcaccatcgatgcggacccccccgacgagcacctcctggatgtgctgcccccgttctgctcgcgcaagggcggcagactctgctggaccaacgagcccctgcgcggcgaggtggccaccagcgtggacctggtcaccctgcataaccgcggctggcgcgtcaggatcgtgcccgacgagcgcaccaccgtcttccccgaatggaagtgcgtcgcgcgcgagtatgtccagctcaacatcgcggccaaggagcgcgccgaccgtgacaaaaatcagaccatgagatccatcgccaagcttctctccaacgccctctatggctccttcgccaccaagcttgacaataaaaaaattgtcttttctgaccagatggatgaaagtttactcaaaagcatcgcggcagggcaggccaacatcaaatcctcctcgtttctagaaactgacaacctgagtgccgaggtcatgcccgctctcgagagggaatacctaccccaacagctggcgctcgtagacagcgacgcggaagagagtgaggacgagcacagacccgcccccttttatacccccccgtcggggaccccaggtcacgtggcctacacctacaagccaatcaccttcttggatgcggaggagggggacatgtgtctgcataccgtggaaaaggtggaccccctggtggacaacgaccgctacccctcgcacgtggcctcctttgtcttggcgtggacgcgcgcctttgtctcagagtggtccgagtttctctacgaggaggaccgcgggacgcccctgcaggacaggcccatcaagtccgtctacggggacacagacagcctgtttgtcaccgaacgcggacacagactcatggagacgcgaggtaagaagcgcatcaaaaagaacgggggaaaactggtttttgaccccgatcaccccgagctcacctggctcgtcgagtgcgagaccgtctgcgcccactgcggagcggacgccttcgcccccgagtccgtctttctagcgcccaagctctacgccctgcaatccctcctatgtcccgcctgcgggcgctcttccaaaggaaagctccgcgccaagggccacgccgccgaggccctcaactacgagctcatggtcaactgctatctcgccgacgcgcagggcgaagaccgtgcccgtttcagcaccagcaggatgagtctcaagcgcacccttgcaagcgcccagcccggggcccacccattcaccgtgacggagaccaccctcactcggaccctgagaccctggaaggacatgacgctggccgcgctggacgcccatcgtctcgtgccctacagtcgcagtcgtcccaacccccgaaacgaggaagtctgctggatcgagatgccgtag

SEQ ID NO: 1335 - DNA, 1047 bp, Adenovirus D69
  MISC_FEATURE (1)..(1047): D69.orf00049 pIVa2 IVa2
atgcccatggccgacggactcaagcccctgaaaaactttgcttccctgcaagagctcctctcgctgggcggggaccgcctcctcggcgagctcgtccgggaaaacctccaagtcagagacatgcttaacgaggtggcccccctcctccgggacgacggcagctgcatctccttgaactaccacctgcaaccagtcatcggggtcatctacggtccgaccgggtgcggcaagtcccagctgctgagaaacctcctctcctcgcagctcatcacccccgccccggaaaccgtttttttcatcgccccgcaggtggacatgattcccccctccgagatgaaagcctgggagatgcagatctgcgaggggaacttcgccccgggccccgagggaaccatagtcccccaatctggcaccctccgccccaaattcattaaaatgtcttatgatgatctcacccaggagcataattatgatgtctctgaccccagaaacgtctttgccaaagccgcagcccacgggcccattgccatcatcatggatgagtgcatggaaaacctgggcgggcacaagggcgtctccaaattcttccacgcattcccttccaagttgcatgacaagttccccaagtgcacaggctacaccgtcctggtggtcctgcacaacatgaacccccggcgggatctgggcggcaacatcgccaacctcaagatccaggccaaactgcacatcatctccccccgcatgcatccctcccagctcaaccgttttgccaacacctacaccaaggggctccccgtggccatcagtctcctcctcaaggacatcatccagcaccacgcccagcgcccctgctatgactggatcatctacaacacgaccccagagcacgaggccatgcagtggtgctacctccacccccgggacgggctcatgcccatgtacctcaacatccaatcccacctctatcgggtcctggaaaaaatccaccgcactctcaatgatcgggagaggtggaccagggcctaccgcgcgcgaaaaaataaataa

SEQ ID NO: 1336 - DNA, 402 bp, Adenovirus D69; identical to SEQ ID NO: 1074
  MISC_FEATURE (1)..(402): D69.orf00053 IX pIX

SEQ ID NO: 1337 - DNA, 1488 bp, Adenovirus D69; identical to SEQ ID NO: 1075
  MISC_FEATURE (1)..(1488): D69.orf00055 E1B 55 kDa protein

SEQ ID NO: 1338 - DNA, 207 bp, Adenovirus D69; identical to SEQ ID NO: 1112
  MISC_FEATURE (1)..(207): D69.orf00059 E1A 14.8 kDa protein

SEQ ID NO: 1339 - DNA, 537 bp, Adenovirus D69
  MISC_FEATURE (1)..(537): D69.orf00060 E1A 28 kDa protein
atggccgcattattgctggaggattatgtgagtacaatattggaggacgaactgcatccatctccattcgagctgggacctacacttcaggacctatatgatttggaggtagatgcccatgatgacgacccgaacgaagaggctgtgaatttaatatttccagaatctctgattcttcaggctgacatagccagcgaagctgtacctacaccacttcatacaccgactctgtcacccatacctgaattggaagaggaggacgagctagacctccgatgttatgaggaaggttttcctcccagcgattcagaggacgaacagggtgagcagagcatgactctaatctcagaatatgcttgtgtggttgtggaagagcattttgtgttggacaatcctgaggtgcccgggcaaggctgtagatcctgccagtaccaccgggataagaccggagacacgaacgcctcctgcgctctgtgttacatgaaaaagaacttcagctttatttacagtaagtggagtaaatgtgagagagactga

SEQ ID NO: 1340 - DNA, 375 bp, Adenovirus E4
  MISC_FEATURE (1)..(375): E4.orf00001 E4 ORF1 protein
atggacgctcaggttttgtatgtgtttctggagggagcgggggctttgctgcctgtgcagaaggggagtaattacattttttacgcacctgccaattttgtgcttcatccgcatggggtcgctttgctggaattaagattaagcattgtagtgcctcaaggctttataggtcgctttttttcactcacggacgccaatgttcccggagtgtatgcttcttctcgaatcatccatgccggccaccgggaaggtctgtcggtgatgctttttaatcataatgtcagcttctacaatggtcgcgccggagaccctgtagcctgcctggtgttggaaagagtgatttatccacctgttcgccaggctagcatggtttaa

SEQ ID NO: 1341 - DNA, 390 bp, Adenovirus E4
  MISC_FEATURE (1)..(390): E4.orf00003 E4 ORF2 protein
atgctggaacgtactccttgcacttattccatcgttgttcctgaggctctaaacgtgcacctagacgacttttcttttgttaattttcttaaaaattgcttgcctgattttctgtccagttatctggaagatatcaccgggtctagccagcatgcttatttcaatcttacatttggcaatgctcactggggaggacttcgctttatctgtaatgtggcttgcccttctcttgttcctggtggtcctatggctaaaaatttcggagaagatatgaatgagtacatacagttactgctaagggaggagcttagggattgcggcagagcaattgatattccacttgttaatctactacaggtgaaccaggagcagaatctgttggaattatga

SEQ ID NO: 1342 - DNA, 336 bp, Adenovirus E4
  MISC_FEATURE (1)..(336): E4.orf00004 E4 ORF3 protein
atgccggtggagggcgctctgcgcgagctttttatcatggctggcttggatttacctcaggaactaatacgaatcattcaaggctggaaaaatgaaaattatctaggcatggtgcaggagtgtaatatgatgattgaggaattagaaaacgctcccgctttcgctgtcctcttgtttctggatgtgcgcgtggaggctttgctggaagccaccgtggaacatctcgagaaccgtgttacctttgacctggctgttattttccaccaacacagtgggggcgagaggtgccacctccgggacctgcattttgaagtgttccgagaccgtttggaataa

SEQ ID NO: 1343 - DNA, 369 bp, Adenovirus E4
  MISC_FEATURE (1)..(369): E4.orf00006 E4 ORF4 protein
atggttcttcctgttcttccctcccccgccgtcaccgaaacccaacaaaattgcatcatctggctgggtttggcccattccaccgtggttgatgtaatcagagccatcagggcggatgggattttcatcacccaagaggctcaggagatactgcacgttctgagggagtggctgttctataacttcaacattgagcgctcgaagcgccgagaccgtcgccgacgagcggtgtgcagtgcccggaccaggttctgctttgtgaaatacgaaaatgtccggaaacagctccatcatgacacgatccagaacacgattagcgttatctcgccatcatccgtaccaaccgccggccaccttacctcgctgtga

SEQ ID NO: 1344 - DNA, 654 bp, Adenovirus E4
  MISC_FEATURE (1)..(654): E4.orf00008 E4 34K protein
atggtcctgacccccgaggaattgagagtgctgaagacatgcatgagcgtgtgcctgtgctgtgccaacatagacttgtttagttcccagttgatccacggtcgcgagcggtgggtgatccactgccattgccagaacccggggtccctgcgctgcatggcgggcgggacggtacttgccatctggttccgcagaattatccagggctgcatgttcaaccagcgggtgatgtggtaccgggaggtggtgaacctgcacatgcccaaggagatcatgtacatgggcagtgtgttctggaggggacgccacctgatttacatcaggatctggtacgatggacatgtgggcagcatagttccacaaatgagttttggctggagcacgttgaactatggactgttgaacaacttggtggtgctgtgctgcacgtactgctccgacctgagtgagatccgcatccgctgctgcgcccgccgtaccaggcgactgatgctcagggccattggcatcatgcgcagggagtccctggacccggaccccttgagtagcagcttgacggagcggcgcagacagcgactgctgcggggcctgatgcgccacaaccgcccgatcccgtttgcggattatgattctcatcgctcttattccagataa

SEQ ID NO: 1345 - DNA, 246 bp, Adenovirus E4
  MISC_FEATURE (1)..(246): E4.orf00009 E4 ORF6/7 protein
gtgattccaatcaccgaggacagccctcagctgttgaactgtgaggtgcagatgcaggagtgcccggagggtttcatctccttgaccgacccgagactgtctcgctctgaaactgtgtggaatgtggagatcaaaaccatgtccattaccaatagcattcagatgtttaaggctgtgcgtggggagaggatagtgtattccatgagatgggagggtggagggaaaataactactcgaatcctgtga

SEQ ID NO: 1346 - DNA, 1278 bp, Adenovirus E4; identical to SEQ ID NO: 159
  MISC_FEATURE (1)..(1278): E4.orf00011 L5 fiber

SEQ ID NO: 1347 - DNA, 156 bp, Adenovirus E4
  MISC_FEATURE (1)..(156): E4.orf00012 U protein
atgaagattgagggacaggaggaatttgacatccccttcagagtgtggaggaagtttgcagcccgccggggcctgcagtaccagagctgggaagaggggagcgaagtgctgctgacagaaaacatggacagagacctggtttcagatttcaagtaa

SEQ ID NO: 1348 - DNA, 402 bp, Adenovirus E4
  MISC_FEATURE (1)..(402): E4.orf00013 E3 14.7K protein
atgactgacccactcaacaacactgtcaacgacctcctggacatggacggccgcggctcggagcagcgtctcgcccaactccgcattcgccagcagcaggagagagccgtcaaggagctgcaggacgcagtggccatccaccagtgcaagaaaggcatcttctgcctggtgaagcaggccaagatctccttcgaggtcacttccaccgaccatcgcctctcctacgagctcctgcagcagcgccagaagttcacctgcctggtcggagtcaaccccatcgtcatcacccagcagtctggcgataccaagggttgcatccactgctcctgcgactcccccgagtgcgttcacaccctgatcaagaccctatgcggcctccgcgacctcctccccatgaactaa

SEQ ID NO: 1349 - DNA, 420 bp, Adenovirus E4
  MISC_FEATURE (1)..(420): E4.orf00015 E3 RID-beta
atgcttctactattgctagctcccctggtcgccccctttcccctcaaatcccccacccagtcccccaaagaggttcgaaactgtaaattccaagaaccctggaaattcctcaaatgctaccagctcaaatcagacatgcaccccagctggataattatcatgggaatcgtgaacatccttgcctgcaccttcttttcctttgtgatttacccccgctttgactttggttggaacgcacccgaggcgctctggctcccgcctgatcccgacacaccaccacagcagcagcaaaatcaggcacacgcaccaccaccacagcctaggccccaatacatgcccatcttaaactatgaggccgagccacaacgagccatgcttcctgctattagttacttcaatctaaccggtggagatgactga

SEQ ID NO: 1350 - DNA, 276 bp, Adenovirus E4
  MISC_FEATURE (1)..(276): E4.orf00016 E3 RID-alpha
atgattcctagacagttctttatcattggtcttctctgcgcgctccaagtctgtgccaccctcgctctggtggctaatgcgagtccagactgcattggaccgttcgcctcctacgtgctctttgccttcatcacctgcatctgctgctgtagcatagtctgcctgcttattaccttcttccagttcgttgactgggtctttgtgcgcatcgcctacctgcgccaccacccccagtaccgcgaccaaagagtggcgcagctgctcaggctcatctga

SEQ ID NO: 1351 - DNA, 825 bp, Adenovirus E4
  MISC_FEATURE (1)..(825): E4.orf00018 E3 CR1-delta1
atgaaggcacttagcactttagtttttttgtccttgattggcattgtttttagtaatcctattcctagagttagctttattaaaccagttaatgttactgaagggagcaatgtgacactggtaggtgtagagggtgctaaaaacaccacctggacaaaatatcaccttaatgggtggaaagatatctgcaattggagtgtgacagtttatacatgcgagggagttaatcttaccattgtcaatgcaacctcagctcaaaatggtagaattcaagggcaaagtgttagtgattctgaggggtattatacccaacatacttttatctatgacattaaggtcataccattgccaacacccagcccacctagcactactcaaaccactacatcaactcagcccaccgccaccacaacagcagaggcatttttgttgctgccaccatctagcagtcccactgctagtaccaataagcagactactaaatttttgtccactactgaaagccacaccacagctaccttgagagccttctctagcaccgctaatcttacctcgctttcctatacattaatcagttctgttactacctctaccccagcttctcttcccactcccctgaagcaaaccgaaggcggtttgcaatggcagatcaccctactcattgtgatcggggtggtcatcctagcgatgctgctctacttcatcttctgccgccgcatccccaacgcgaaaccggtctacaagcccatcgttatcgggcagccggagccgcttcaggtggagggaggtctaaggaatcttctcttctcttttacagtatggtga

SEQ ID NO: 1352 - DNA, 663 bp, Adenovirus E4
  MISC_FEATURE (1)..(663): E4.orf00022 E3 CR1-beta1
atggcctctgttacagccattatttattttttgggtcttctgggatttatcaacagttttgaccataaaaacgtaactgcttatgttggttctaactgtgtactaactgggtaccagtcacaccaacgggtttcatggtactggtttgataaaaaaaacacagcttatacactttgcaaaggtaatcagcggcccacacagcgcagtggtctttattacagctgcactaataataatatcacactacttcaagtgactaaacaatattctgggacatactatggaaccaattttaacacggaacaggacacttactatagtgtcaaagtattggatccaactactcccagaactactaccaaacataccacaactaaaaagcccactatacctaaaaccactaaattaacaaccacaaccagcaccacacttgctgtgacctcacaggcaactactgaaaacgaattggttgccctgttgcagaatggggagaataatagcagcagtcctctgcctaccacccccagtgagcaaattcccagatccatgattggcattatcgctgctgtggtggtgtgtatggtcattatcatcttgtgcatgatgtactatgcctgctactacagaaaacacagactgaacaacaagctggacccctactga

SEQ ID NO: 1353 - DNA, 498 bp, Adenovirus E4
  MISC_FEATURE (1)..(498): E4.orf00024 E3 gp19K protein
gtgctggtggcggtactttcgattttgggtctgggcagcgcggctgtagtgacggagaaggccgatccctgcttgacttttaaccccgacaaatgccagctgagttttcagccagatggcaatcggtgcgcggtgttgattaagtgcggatgggaatgccagagcgtggcgatccagtataaaaacaagacgcggaacaatactctcgcgtccacatggcagcccggggaccccgagtggtacaccgtctctgtccctggtgctgacggcttccttcgcacggtaaacaacacttttatttttgagcacatgtgcaataccgccatgttcatgagcaggcagtaccatatgtggcccccacggaaagagaatatcgtggtcttctccatcgcttacagcttgtgcacggtgctaatcaccgcgatcgtgtgcctgagcattcacatgctcatcgctattcgccccagaaataatgctgagaaagagaaacagccataa

SEQ ID NO: 1354 - DNA, 633 bp, Adenovirus E4
  MISC_FEATURE (1)..(633): E4.orf00025 E3 CR1-alpha1
atgaaagtctttgttgtctgctgtgtactgagtataataaaagctgagatcagcgactactccggactcgattgtgttcctgcatccctcaaccagtctctgaccttcaccgggaacgaaacagagctccatctccagtgtaagccccacaaaaagtacctcacctggctgcaccagggctccccaatcgccgttgttaaccactgcaacgacgacggagtcctgctgaacggccccgccaaccttactttttccacccgcagaagcaagctactgctcttccgacccttcctaccagggatctatcagtgcgtctcgggaccctgccatcacaccttccacctgatcccgaataccacctcttccccagcgccgctcctcactaacaaccaaactaaccaccaccaacgctaccgtcgagacctcgttgaatctaataccacccacaccggaggtgagctccgaggtcctcagtcatctgggatttattacggtccctgggaggtggtggggttaatagctttaggcttagtagcgggtgggcttttggctctttgctacctatacctcccttgcttttcctacttagtggtgctttgttgctggtttaagaaatggggaagatcaccctag

SEQ ID NO: 1355 - DNA, 321 bp, Adenovirus E4
  MISC_FEATURE (1)..(321): E4.orf00026 E3 12.5K protein
atgtcccatggtggcgcggctgacctagctcggcttcgacacctggaccactgccgccgctttcgctgcttcgctcgggacctcgccgagtttacctactttgagctgtccgaggagcaccctcagggcccggcccacggagtgcggatcgtcgtcgaagggggcctagactcccacctgcttcgtatcttcagccagcgcccgatcctggtccagcgccaacagggcaacaccctcctgaccctttactgcatctgcaaccaccccggcctgcatgaaagtctttgttgtctgctgtgtactgagtataataaaagctga

SEQ ID NO: 1356 - DNA, 684 bp, Adenovirus E4
  MISC_FEATURE (1)..(684): E4.orf00028 L4 VIII
atgagcaaagaaattcccacgccttacatgtggagctaccagccccagatgggcctggccgccggcgccgcccaggactactccacccgcatgaattggctcagcgccgggcccgggatgatctcacgggtgaatgacatccgcgcccaccgaaaccagatactcctagaacagtcagcgctcaccgccacgccccgcaatcacctcaatccgcgtaattggcccgccgccctagtgtaccaggaaattccccagcccacgaccgtactacttccgcgagacgcccaggccgaagtccagctgactaactcaggtgtccagctggcgggcggcgccaccctgtgtcgtcaccaccccgctcagggtataaagcggctggtgatccggggcagaggcacacagctcaacgacgaggtggtgagctcttcactgggtttgcgacctgacggagtcttccaactcgccggatcgggaagatcttccttcacgcctcgtcaggccgtgctgactttggagagttcttcctcgcaacctcgctcgggcggcatcggcactctccagtttgtggaggagttcactccctcggtctacttcaaccccttctccggctcccccggccactatccggacgagttcatcccgaacttcgatgccatcagcgaatcggtagacggctacgattga

SEQ ID NO: 1357 - DNA, 141 bp, Adenovirus E4
  MISC_FEATURE (1)..(141): E4.orf00030 L4 22K protein
gtggattttctagctgctggttttgtctttttctgcctcttcttggaagtagtaggggctgtggaggtgacggtagtaatgcaagatgttgcgggggaagttcaccccgcggtgaaagagcaggtagcgccgggtgaatga

SEQ ID NO: 1358 - DNA, 2376 bp, Adenovirus E4
  MISC_FEATURE (1)..(2376): E4.orf00032 L4 100K protein
atggagactcagccatcgtcgccaacctcgccatctgcccccaccgccgacaagaagcagcagcagaatgagagcttaaccgccccgccgcccagccccgccacctttgtcgcggccccagacatgcaagagatggaggaatccattcagattgacctgggctatgtgacgcccgcggagcacgaggaggagcttgcagtgcgcttttcaacccaggaagagatacaccaagaacagccagagcaggaagcaaagagcgagcatgactacctccaccagagcgggggggaggacgccctcatcaagcatctggcccggcaggccatcatcgtcaaggacgcgctgcttgaccgcaccgaggtgcccctcagcgtggaggagctcagccgcgcctacgagctcaacctcttctcgccgcgcgtgccccccaagcgccagcccaacggcacctgcgagcccaacccacgcctcaacttctacccggtcttcgcggtgcccgaggccctggccacctaccacatctttttcaagaaccaaaggatccctgtctcctgtcgcgccaaccgcacccgcgccgactcccttttcaacctgggccccggtgcccgcctacctgatatcgcctccttggaagaggttcccaagatcttcgagggtctgggcagcgacgagactcgggccgcaaacgctctgcaaggagaaggaggagatcatgagcaccacagcgccctggtggagttggaaggcgacaacgcgcgtctggcggtgctcaagcgcacgatcgagctgacccatttcgcctacccggcgcttaacctgccccccaaagtcatgagcacggttatggaccaggtgctcatcaagcgcgcgtcgcccatctccaaggagatgcaagaccccgagagctccgaggagggcaagcccgtggtcagcgacgagcagctggcgcggtggctgggaccccaagctagtccccagagcttggaagagcggcgcaagctcataatggccgtggtcctggtgaccgcggagctggagtgtctgcgccgcttcttcgccgacgcagaaactctgcgcaaggtcgaggagaacctgcactacatcttcaggcacgggttcgtacgccaggcctgcaagatctccaacgtggagctgaccaacctggtctcctacatgggcatcttgcacgagaaccgcctggggcagaacgtgctgcacaccaccctgcgcggggaggcccgccgcgactacatccgcgactgcgtttacctctacctctgccacacctggcagacagccatgggcgtgtggcagcagtgtctggaggagcagaacctaaaagagctctgcaagctcctgcagaagaacctcaaggccctgtggaccgggttcgacgagcgcaccaccgcctcggacctggcagacctcattttccccgagcgtctcaggctgacgctgcgcaacggtttgcccgactttatgagtcaaagcatgttgcaaaactttcgctctttcatcctcgaacgctccgggatcctgccggccacctgctccgcgctgccctcggacttcgtgccgctgaccttccgcgagtgccccccgccgctgtggagccactgctacctgctgcgcttggccaactacctggcctaccactcggacgtgatcgaggacgtcagcagcgagggcctgctcgagtgccactgccgctgcaacctctgcacgccgcaccgctccctggcctgcaacccccagctgctgagcgagacccagatcatcggcaccttcgagttgcaagggcccggcgatgagggttctgccgccaaggggggtctgaaactcaccccggggctgtggacctcggcctacttgcgcaagttcgtgcccgaggactaccatcccttcgagatcaggttctacgaggaccaatcccagccgcccaaggccgagctgtcggcctgcgtcatcacccagggggcgatcctggcccaattgcaagctatccagaaatcccgccaagaattcttgctgaaaaagggccgcggggtctaccttgatccccagaccggtgaggagcttaaccccggcttcccccaggatgccccgaggaagcagcaagaagctgaaagtggagctgccgcccgtggaggatttggaggaagactgggagagcagtcaggcagaggaggaggagatggaagactgggacagcactcaggcagaggacagcctgcaagacagtctggaagacgaggaggaggcagaggaggtggaagaagtagccgccgccgccagaccgtcgtcctcggcggagaaagcaagcagcacggataccatctccgctccgggtcggggtcccgctcgaccccacagtag

SEQ ID NO: 1359 - DNA, 1539 bp, Adenovirus E4
  MISC_FEATURE (1)..(1539): E4.orf00034 E2A DBP
atggccggccgcggaggaagtcagttagagcgccgccgggagcgcacccccgatcgcggaaggggctctgccagccacccgccgggccgcgagagcccgtcgcctccgcctctgcccctgaagagacatacctaccgccgcgtggcctcggaccaagaagaagagatagtagtggtgagcgagaactcgcgctccccctcgcctcaggaacaaccaccgccgccgcagcagccgcccaaaaagaaaccccgcaaaacgaagcatgtgcccctgcaggacgtcagccaggacagcgaggacgaaagagaggccgaggaggagctggcggccgtgggcttcagctacccccccgtgcggatcaccgagaaggacggcaagcggagctttgagactctcaatgagaacgacccgctgacgaaggctgctagcgctaagatggcggtgacgaaccccctgagcctgcccattgtatcggcctgggagaagggcatggaaatcatgaatatgctgatggagcgctaccgtgtggaaagcgacctaaaatccaacttccaactgatgcccgagcagggcgaggtgtatcgccgcatctgccacctgtacatcaacgaggagcaccgcggcattccgctgacctttaccagtaacaagaccctgacgaccatgatgggccgcttcctgcaggggttcgtgcatgcgcattcccagatcgcccacaagaactgggagagcacggggtgcgcgctgtggctgcacggctgtaccgaagtcgagggcaagctgcggtgcctgcacgggaccaccatgatccagaaggagcacatgatcgagatggatgtggcaagcgagaacgggcaacgcgcgctaaaggagaaccccgaccgggccaagattacccagaaccgctgggggcgcagcgtggtgcagctggccaacaacgacgcgcgctgctgcgtgcacgacgccgggtgcgctaccaaccagttttctagcaagtcctgcggggtcttcttcaccgagggagccaaggcccagcaggcgtttaagcagctggaggctttcatgaaggccatgtacccggggatgaacgccgaccaggcccagatgatgctgatccccctgcactgcgattgcaaccacaagcccggctgcgtgcccaccatgggccggcagacctgcaagatgacccccttcgggatggccaacgccgaagacctcgacgtggacgggatcaccgacgctacggtgctggcgagcgtgaagcatccggccctgatggtgttccagtgctgcaaccctgtgtaccgcaactctcgcgcgcaaaacgcgggtcccaactgcgatttcaagatctccgcgcccgacctgctgggcgccctgcaactgacgcggaagctgtggaccgactcgttccccgacaccctgctgccgaaactgctgatccccgagttcaagtggctggccaagtaccagttccgcaacgtgtccctgcccgcgggccatgccgaaacctcccggcagaaccccttcgatttttaa

SEQ ID NO: 1360 - DNA, 621 bp, Adenovirus E4
  MISC_FEATURE (1)..(621): E4.orf00035 L3 protease
atggccgcgggctccggcgagcaggagctcagggccatcatccgcgacctggggtgcgggccctacttcctgggcaccttcgataagcgattcccgggattcatggccccgcacaaggtggcctgcgccatcgtcaacacggccggccgcgagaccgggggcgagcattggctggccttcgcctggaacccgcgctcgaacacctgctacctcttcgaccccttcgggttctcggaccagcgcctcaagcaaatctaccagttcgagtacgagggactgctgcgccgcagcgccctggccaccaaggaccgctgcgttaccctggaaaagtccacccagaccgtgcagggtccgcgttcggccgcctgcgggcttttctgctgcatgttcctacacgccttcgtgcactggcccaaccgccccatggacaaaaatcccaccatgaacttgctgacgggggtgcccaacggcatgctccagtcgccccaggtggaacctaccctgcgccgcaaccaggaggcactctaccgcttcctcaactcccactctgcatactttcgctctcaccgcgcgcgcattgagaaggccaccgccttcgaccgcatgaatcaagacatgtaa

SEQ ID NO: 1361 - DNA, 2775 bp, Adenovirus E4; identical to SEQ ID NO: 219
  MISC_FEATURE (1)..(2775): E4.orf00037 L3 hexon

SEQ ID NO: 1362 - DNA, 129 bp, Adenovirus E4
  MISC_FEATURE (1)..(129): E4.orf00038 L3 hexon
atgtacgcccactggggcagcatcgatggggtggccatcttgcaactcgacgacgcgcctttctcttcactcctccttctggacagcagcggcggcggacatacacatatacacagacaagcaagttaa

SEQ ID NO: 1363 - DNA, 729 bp, Adenovirus E4
  MISC_FEATURE (1)..(729): E4.orf00039 L3 pVI
atggaagacatcaatttttcgtccctggctccgcgacacggcacgcggccgtttatgggcacctggagcgacatcggcaccagccaactgaacgggggcgccttcaattggagcagtctctggagcgggcttaagaattttgggtccacgcttaaaacctatggcagcaaggcgtggaacagcaccacagggcaggcgctgagagataagctgaaagagcagaacttccagcagaaggtagtcgatggcctcgcctcaggcatcaacggggtggtggacctggccaatcaggccgtgcagcggcagatcaacagccgcctggacccggttccccccgccggctccgtggagatgccgcaggtggaggaggagctgcctcccctggacaagcggggcgacaagcgtccccgtcccgacgcggaggagacgctgctgacgcacacggacgaaccgcccccgtacgaggaggcggtgaaactgggcctgcccaccacgcgtcccattgcgcctctagctaccggggtgctgaaacccgagagtagtaagcccgcgaccttggacttgcctcctccgcccactccccgcccctccacagtggctaagcccctgccgccggtggccgtggcccgcgcgcgaccgggggctcgccctcaggcgaactggcagagcactctgaacagcatcgtgggtctgggagtgcagagtgtgaagcgccgccgctgttattaa

SEQ ID NO: 1364 - DNA, 234 bp, Adenovirus E4
  MISC_FEATURE (1)..(234): E4.orf00040 L2 pX
atggctctcacatgccgcattcgcgtccccattacgggctaccgaggaagaaaaccgcgccgtagaaggctggcgggaagcgggatgcgccgccacccccaccggcggcggcgcgccatcagcaagcggttggggggaggcttcctgcccgcgctgatccccatcatcgccgcggcgatcggggcgatccccggcattgcttccgtggcggtgcaggcctctcagcgccactga

SEQ ID NO: 1365 - DNA, 1029 bp, Adenovirus E4
  MISC_FEATURE (1)..(1029): E4.orf00041 L2 V
atgtccaagcgcaaattcaaggaagagatgctccaggtcatcgcgcctgagatctacggccccgcggcggcggtgaaggatgaaagaaatccccgcaaaatcaagcgggtcaaaaaggacaaaaaggaagaagatgatgtggacgatatggtagagtttgtgcgcgagtttgccccccggaggcgcgtgcagtggcgcgggcggaaagtgcgtccggtgctgagacccggcaccacggtggttttcgcgcctggcgagcggtccggcacgacatccaagcgctcctacgatgaggtgtacggggacgaggatattctcgagcaggcggccgagcgcctgggcgagtttgcttacggcaagcgcaaccgccttgcgcccctgaaggaagaggtggtgtccatcccgctggaccacggcaaccccacgccgagtcttaagcccgtgaccctgcagcaggtgctgccgagcgcggcgccgcgtcggggcttgaagcgcgagggcgaggatgtgtaccccaccatgcagctgatggtgcccaagcgccagaagctggaagacgtgctggagaccatgaaggtggacccggacgtgcagcccgaggtcaaggtgaggcccatcaagcaggtggccccgggccttggcgtgcagaccgtggacatcaagatccccacggagcccatggaaacgcagaccgaggtcgtgaagcccatcaccagcaccatggaggtgcagacggatccttggatgccggcggcgccccgaaaaccccggcgcaagtacggcgcggccagcctgctgatgcccaactacgcgctgcatccttccatcatccccacgccgggctaccgcggcacgcgcttctaccacggctataccggctcccgccgccgcaagaccaccacccgccgccgccgtcgtcgccgcacagctgcaactcccgctgccgccctggtgcggagagtgtaccgccgcggccgcgcgcctctgaccctgccgcgggcgcgctaccacccgagcattaccatttaa

SEQ ID NO: 1366 - DNA, 582 bp, Adenovirus E4
  MISC_FEATURE (1)..(582): E4.orf00043 L2 pVII
atgtccattctcatctcgcccagtaataacaccggttggggtctgcgcgcgcccagcaagatgtacggaggcgctcgccaacgctccacgcaacaccccgtgcgcgtgcgcgggcacttccgcgctccctggggcgccctcaagggccgcgtgcggtcgcgcaccaccgtcgacgacgtgatcgaccaggtggtggccgacgctcgcaactacacccccgccgccgcgcccgtctccaccgtggacgccgtcattgacagcgtggtgtccgacgcgcgccggtacgcccgcgccaagagccggcggcggcgcatcgcccggcggcaccgtagcaccaccgccatgcgtgcggcgcgagccttgctgcgcagggccaggcgcacgggacgcagggccatgctcagggcggccagacgcgcggcttcaggcgccagcgccggcaggactcggagacgcgcggccacggcggcggcagcggccatagccagcatgtcccgcccgcggcgagggaacgtgtactgggtgcgcgacgccgccaccggtgtgcgcgtgcccgtgcgcacccgcccccctcgcacttga

SEQ ID NO: 1367 - DNA, 1608 bp, Adenovirus E4
  MISC_FEATURE (1)..(1608): E4.orf00046 L2 III
atgatgaggcgtgcgtacccggagggtcctcctccctcgtacgagagcgtgatgcagcaggcaatggcggcggcggcggcgatgcagcccccgctggaggctccttacgtgccaccgcggtacctggcgcctacggaggggcgaaacagcattcgttactcggagctggcacccttgtacgataccacccggttgtacctggtggacaacaagtcggcggacatcgcctcgctgaactaccagaacgaccacagcaactttctgaccaccgtggtgcagaacaacgatttcacccccacggaggccagcacccagaccatcaactttgacgagcgctcgcggtggggcggtcagctgaaaaccatcatgcataccaacatgcccaacgtgaacgagttcatgtacagcaacaagttcaaggcgcgggtcatggtctcccgcaagacccccaacggggtgacagtaggggatgattatgatggtagtcaggatgagctgaaatacgagtgggtggagtttgagctgcccgaaggcaacttctcggtgaccatgaccattgacctgatgaacaacgccatcatcgacaattacttggcagtggggcggcagaacggggtgctggagagcgacatcggcgtgaagttcgacacccggaacttcaggctgggttgggaccccgtgaccgagctggtcatgcccggggtgtacaccaacgaggccttccaccccgacatcgtgctgttgcccggctgcggggtggactttaccgagagccgcctcagtaatatgctgggcatccgcaagaggcagcccttccaggagggtttccagatcatgtacgaggacctggatggaggtaacatccccgcgctcttggatgtcgaggcctatgagaaaagcaaggaggagagcgtcgccgcgtcaaccgcagccgtagccaccgcctctaccgaggtccggggcgataattttgctagcgccgcagcagtggcggcggccaaggctgatgaaaccgaaagtaagatagttattcagccggtggagaaggatagcaaggataggagctacaacgtgctctcggacaagaaaaacaccgcctaccgcagctggtacctggcctacaactatggcgaccacgagaagggcgtgcgctcctggacgctgctcaccacctcggacgtcacctgcggcgtggagcaagtctactggtcgctgcccgacatgatgcaagacccggtcaccttccgctccacgcgtcaagttagcaactacccggtggtgggcgccgagctcatgcccgtctactccaagagcttcttcaacgagcaggccgtctactcgcagcagctgcgcgccttcacctcgctcacgcacgtcttcaaccgcttccctgagaaccagatcctcgtccgcccgcccgcgcccaccattaccaccgtcagtgaaaacgttcctgctctcacagatcacgggaccctgccgctgcgcagcagtatccggggagtccagcgcgtgaccgttactgacgccagacgccgcacctgcccctacgtctacaaggccctgggcatagtcgcgccgcgcgtcctctcgagccgcaccttctaa

SEQ ID NO: 1368 - DNA, 1776 bp, Adenovirus E4
  MISC_FEATURE (1)..(1776): E4.orf00047 L1 pIIIa
atgcagcaacagccacctcctgatcccgcaatgcgggcggcgctgcagagccagccgtccggcattaactcctcggacgattggacccaggccatgcaacgcatcatggcgctgacgacccgcaaccccgaagcctttagacagcagccccaggccaaccggctctcggccatcctggaggccgtggtgccctcgcgctccaaccccacgcacgagaaggtgctggccatcgtgaacgcgctggttgagaacaaggccattcgcggcgacgaggccgggctggtgtacaacgcactgctggagcgcgtggcccgctacaacagcaccaacgtgcagaccaacctggaccgcatggtgaccgacgtgcgcgaagccgtggcccagcgcgaacggttccaccgcgagtccaacctgggatccatggtggcactgaacgccttcctcagcacgcagcccgccaacgtgccccggggccaggaggactacaccaacttcattagcgccctgcggctaatggtgaccgaggtgccccagagcgaggtgtaccagtcgggcccggactacttcttccagaccagtcgccagggcttgcagaccgtgaacctgagtcaggctttcaagaacttgcagggactgtggggcgtgcaggctccggtcggggaccgcgcgacggtgtcgagcctgctgacgccgaactcgcgcctgctgctgctgctggtggcgcccttcacggacagcggtagtatcaaccgcaactcgtacctgggctacctgattaacctgtaccgcgaggccattggccaggcgcacgtggacgagcagacctaccaggagattacccacgtgagccgcgccctcggccaggacgacccgggcaatctggaagccaccctgaacttcttgctgaccaaccggtcgcagaagatcccgccccagtacgcgctgagcgccgaggaggagcgtatattgagatacgtgcagcaaagtgtgggactgttcctgatgcaggagggggccacccccagcgccgcgctcgacatgaccgcgcgcaacatggagcccagcatgtacgccagtaatcgcccgtttattaataagctgatggactacctgcatcgggcggccgccatgaactctgactatttcaccaacgccatcctgaacccccactggctcccgccgccggggttctacacgggcgagtacgacatgcccgaccccaatgacgggtttctgtgggacgacgtggacagcagcgtgttctccccccgaccgggtgctaacgagcgccccttgtggaagaaagagggcagcgaccggcgcccgtcctcggcgctgtccggccgcacgggtgctgccgcagcggtgcccgaggccgccagtccctttccgagcttgtcactgaacagcgtccgcagtagcgagctgggcaggatcacgcgcccgcgcttgctgggcgaggaggagtacttaaataactcgctgttgaggcccgagcgggagaagaacttccccaataacgggatagagagtctggtggataagatgagccgctggaagacgtacgcgcatgagcacagggacgatccccgggcaacgcagggggccaccagccggggcagtgccgcccgtaaacgccgctggcacgacaggcagcggggactgatgtgggacgatgaggattccgccgacgacagcagcgtgttggacttgggcgggagtggtggtggtaacccgttcgctcacctgcgcccccgcgtcgggcgcctgatgtaa

SEQ ID NO: 1369 - DNA, 1173 bp, Adenovirus E4
  MISC_FEATURE (1)..(1173): E4.orf00049 L1 52K protein
atgcatcccgtactgcggcagatgcgcccccaccctccaccgcaacagcagccccctcctacgcaacagccggcgcttctgcctccgccccagcagcagcaacttccagccactaccgccgcggccgccgtgagcggggccgggcagagtcagtatgacctggctttggaagagggcgaggggctggcgcgcctgggggcgtcgtcgccggagcggcacccgcgcgtgcagatgaaaagggacgctcgcgaggcctacgtgcccaagcagaacctgttcagagacaggagcggcgaggagcccgaggagatgcgcgcagcccgtttccacgcggggcgggagctgcggcgcggcctggacagaaagagggtgctgagggacgaggatttcgaggcggacgagctgacggggatcagccctgcgcgcgcgcacgtggccgcggccaacctggtcacggcgtacgagcagaccgtgaaggaggagagcaacttccaaaaatccttcaacaaccacgtgcgcaccctgatcgcgcgcgaggaggtgaccctgggcctgatgcacctgtgggacctgctggaggccattgtgcagaaccccaccagcaaaccgctgacggcgcagctgttcctggtggtgcagcacagtcgggacaacgagacttttagggaggcgctgctgaatatcaccgagcccgagggccgctggcttctggacctggtgaatattctgcagagcatcgtggtgcaggagcgcgggctgccgctgtccgagaagctggcggccatcaacttttcggtgctgagtttgggcaagtactacgctaggaagatctacaagaccccgtacgtgcccatagacaaggaggtgaagatcgacgggttttacatgcgcatgaccctgaaagtgctgaccctgagcgacgatctgggggtgtaccgcaacgacaggatgcgccgcgcggtaagcgccagcaggcggcgcgagctgagcgatcaggagctgatgcacagcctgcagcgggccctgaccggggccgggaccgagggggagagctactttgacatgggcgcggacctgcactggcagcccagccgccgggtcttggaagccgcggcggtcccttacgtagaagaggtggacgatgaggatgagggcgagtacctggaagactga

SEQ ID NO: 1370 - DNA, 1875 bp, Adenovirus E4
  MISC_FEATURE (1)..(1875): E4.orf00050 E2B pTP
atgaactacttcctgccgctgcgcaacatctggaaccgcgtccgcgagttccctcgcgcctccaccaccgccgccggcatcacctggatgtcaaggtacatctacggctaccaccgcaccatgctcgaggacctagcgcccggcgcccccgccaccgagcgatggccgctctaccgccagccgccgccgcacttcctcatcggctaccagtacctggtgcgcacctgcaacgactacatcttcgactcgcgcgcctactcgcgcctcaagtaccacgagctcgcgcggcccggtcaccagactgtcaactggtccgtcatggccaactgctcctacaccattaacaccggagcctaccaccgcttcgtcgactttgacgacttccagaccaccctcacccagatccagcaggccatcctcgccgagcgcgtcgtcgctgacctggcgctcgtccagccgcagcgcgggtttgggctcacgcgtatgcacggccgcgcgggcgaggaggaggtgcccgtggagcggctcatgcaggactactacaaggacctggccaggtgtcaggaccacgcctggggcatggccgaccgtctgcgcatccagcaagccgggcccaaagacctggtgctcctcgccaccatccgccgtctcagaaccgcctatttcaacttcatcaccagcagcatcgcccccgcccacaccccaccgccgccagaagaaaccgtgctcagcctaccttgcgactgcgactggctcgaagccttcgttcaacggttttcagatcccgtggatctagagacgcttaggtccttgcgcggagtccctacggggcaattgataagatgcatcgtcagcgcactctccctgcccaacggggaccccccgggccacctggagatgcgcggcggcgtctttacgctgcgaccccgcgaggacgggcgcgccgtcaccgagaccatgcgacgccggcgcggcgagaccatcgagcgtttcatcgaccgtctgcccgtgcgccgccggcgacgcaggccccctcccccgccaccaccgcctgaggaggaagtagaagagatgttagtggatgaagaggaggaagtggaggaactcccgggagccttcgagcgcgaggtgcgcgccaccatcgccgagctcatccgtcttctggaggaggacttgaccgtatctgcacgcaactcccagtttttcaacttcgccgtggacttttacgaggccatggagcgcttggaagccctgggcgacgtcagcgaaatgccgctccgccgctggattatgtacttctttgtcactgagcacattgccaccacgctcaactacctctaccagcgcctctgcaactacgcggtttttgcgcgccacgtggagctcaacctcgcccaggtggtcatgcgcgcccgcgatcccgagggcgccgtggtttacagccgcgtctggaacgaggcgggcatgaacgccttctcgcagctcatgggccgcatctccaacgacctcgcggccaccgtggagcgcgccggccgcggagaccttcaggaggaggagatcgagcagttcatgaccgagattgcctaccaggacaactcgggcgacgtgcaagagattctgcggcaggccgccgtcaatgataccgagattgattctgtcgaactgtctttcaggttcaaactcacgggtcccgtggccttcacccagaggcgtcagatccaggacgtcaaccgtcgcgtcgtcgctcacgccagtcttctccgggcgcagtaccagaacctgcccgcgcgcggcgccgacgtgcccctgccaccactgcctccgggtcccgagccgcccctaccgcccggcgcgcgtcctcgccgccgcttttaa

SEQ ID NO: 1371 - DNA, 3369 bp, Adenovirus E4
  MISC_FEATURE (1)..(3369): E4.orf00051 E2B pol
atggaagccaaaccgcttccgcccgccaagaagaaacgggggacggtggtcactccccaggggcacgggacactgcaagccatcgacgtcgccaccaacggcgcggtggagatcaagtaccatctggacctcccgcgcgcccttgaaaaactcctgcaagtcaaccgcgcgccgccgctgcccactgacctgactccgcagcgtctcaggaccctggacagctccggcctgcgcgccctcgtcctcgctctccgacccgttcgcgccgaggtctggacctgcctcccgcgcgggctcgtcagcatgaccaccatcgaggcagaagagggccaggccgaccaccacgacgtagtacagcaccagatgcaggcgccacgactccacttcccactgaaattcctcgtcaaaggaacccaggtacagctcgtgcagcacgtgcatcccgtgcagcgttgcgagcactgtggccgcttgtataaacacaagcacgaatgttcggcgcgccgtcggcatttctacttccatcacatcaacagccattcctccaactggtggcaggagatccagttcttccccatcggctcgcatcctcgcaccgaaaggctcttcctcacctacgatgtggaaacctacacctggatggggtccttcggcaagcagctcgtccccttcatgctggtcatgaaactctccggggacgaccggctcgttgagctcgcccttgatctcgccctccagctaaaatgggaccgttggcacggcgacccccgcaccttctactgcgtcacccccgaaaaaatggccgtgggtcagcagttccgccagtaccgggatcgtctgcaaaccgccctggccgtggatctctggacttccttcctccgcgccaacccccatctcgccgactgggccctcgagcagcacgggctcagcgaccccgacgagctcacctacgaggagctcaagaaactgccccacgtcaagggccgcccgcggttcgtggaactatacattgtgggccacaacattaacggcttcgacgagatcgtgctcgccgcccaggtcatcaacaaccgggccgaggtgccccagcctttccgcatcactcgcaactttatgccccgcgcgggcaagatcctcttcaacgatgttactttcgctttgcccaaccccgcctacaagaagcgcacggacttccagctctgggagcaggggggctgcgacgatatcgacttcaagcaccagttcctaaaggtcatggtcagggacaccttcgccctcacgcacacctccctgcgcaaggccgcccaggcctatgccctccccgtggagaagggctgctgcgcctacaaggccgttaaccagttctacatgctaggctcttaccgtgccgaccaggacgggttcccccttgaagagtactggaaggaccgcgaagagttccttctcaaccgcgagctgtggaaacaaaagggccagctcaagtatgacatcatccaagagacccttgactactgcgccctggacgtcctcgtcaccgccgagcttgtcgccaagctgcaagactcctacgcccacttcatccgcgactcggtcggcctgccccacgcccacttcaacatcttccaaagacccaccatctcctccaactcccacgccatcttccgtcagatcgtctaccgcgccgaaaaacccagccgcgccaatctcggagccgggctcctcgccccctcgcacgagttgtatgactacgtgcgcgccagcatccgcgggggccgctgctaccccacctacattggcatccttgatgagcccctctacgtctacgacatctgcggcatgtacgcctccgcgctcacccaccccatgccctggggcacgccccttagtccctacgagcgcgcgctggccgtgcgcgaatggcaagcttctctggacgatctgggcacctgcataagctacttcgaccccgacctcctgccaggcatcttcaccatcgatgctgacccccccgacgagcttatgctggaccccctgccccccttctgctcgcgcaagggcggccgcctctgctggaccaacgagcccctgcgcggcgaggtggccaccagcgttgacctcatcaccctgcataaccggggctggcaggtcagaatcgtgccagacgagctaaccaccgtcttccccgaatggaagtgcgtggcgcgcgagtacgtgcagctcaacatcgccgccaaggagcgcgccgacaaggaaaagaaccagaccatgcgctccatcgccaagctcctctccaacgccctctacggctccttcgccaccaaactcgacaacaaaaagattgtcttttctgaccagatggacgaggggctcttgaaaggcatctccgccggcaccgtcaatatcaaatcctcctcgtttctagaaactgacaacctgagtgcggaggtcatgcccgcctttgagagggaatacctaccccaacagctggcgctcctggacagcgatccggaagacagtgaagacgagcagcggcccgcccccttttatacccccccggccgggacccccggtcacgtggcctacacttacaagccaatcaccttcctggatgtggacgagggggacatgtgtttgcatacactggagaaggtggacccgctggtggataacgaccgctatccctcccacgtggcctccttcgtgctggcttggacccgggccttcgtctcagagtggtcgggtttcctctacgacgaggaccgcggcgtcccactcgaggaccgacccataaagtcggtttacggggacacggacagcctctttgtcacccagcggggacacgagctcatggagaccagaggtaagaaacgcatcaaaaagaacggcggaaaactggtttttgatcccaatcagcccgacctcacctggctcgtggagtgcgagaccgtctgcgcccactgcggcgcggacgcctacgcccccgagtccgtcttcctcgcccccaagctctacgccctcaagtccctcctctgtcccgcctgtgggcagacttccaaaggtaagctccgcgccaaaggccacgcggccgaggcgctcaactacgaactcatggtcaattgctacctggccgacgcacagggcgccgatcgggagcggttctcgaccagccggatgagcctgaagcgcaccctcgcaagcgcccagcccggcgcgcacccctttaccgtgacggagaccaccctgacgcggacgctgcgaccctggaaggaccggaccctggccgcgctggacgcccatcgtctggcgccctactcccgcagtcgccccaacccgcgaaacgaggaggtctgctggatcgagatgccgtag

SEQ ID NO: 1372 - DNA, 1047 bp, Adenovirus E4
  MISC_FEATURE (1)..(1047): E4.orf00052 IVa2
atgcccatggccgacgggctcaagccgctgaaaaacttcgcctcgctccaggagctcctctcgctgggcggagagcgactcctggcggaactggtgcgcgagaacatgcacgtgcgccaaatgatgaacgaggtggccccccttcttagggaggacggcagctgtgtctccctcaactaccacctgcagccggtcattggggttatctacggccccaccggctgcggtaagtcccagctactccgcaacctgctttccgcccagctcatctcccccgccccggaaaccgttttctttatcgccccgcaggtggacatgatccccccctcggagcttaaggcctgggagatgcagatctgtgagggaaactacgcccccgggattgagggtaccttcgtcccccaatcgggcaccctccgccccaaattcattaaaatggcctatgaagatctcacccaggaccacaactacgatgtgtccgacccccgaaacgtctttgcccaagccgccgcccacgggcccatagccattatcatggatgagtgcatggaaaacctgggcggccacaagggcgtctccaaattctttcatgccttcccttccaagttgcatgacaaattccccaagtgcaccggatacaccgtgctggtggtcctgcacaacatgaatcccaggcgggatctgggcggtaacatcgccaatctgaagatccaggctaagatgcacctcatctccccccgcatgcatccctcccagctcaacaggtttgtaaacacctacaccaaagggctgcccgtggccatcagtctcctcctcaaagatattgtgcaacaccacgccctgcgtccctgctatgactgggtgatttacaacaccacccccgagcacgaggccctgcaatggagctaccttcacccccgggacgggctcatgcccatgtacctcaatatccaatcccacctctaccgggtcttggaaaagatccaccgggtgctcaatgatcgaggccggtggtccagggcctaccgtgcgcgaaaaatcaaataa

SEQ ID NO: 1373 - DNA, 429 bp, Adenovirus E4
  MISC_FEATURE (1)..(429): E4.orf00054 IX
atgagcggaaacggctcctttgagggaggggtattcagcccttatctgacggggcgtctcccctcctgggcgggagtgcgtcaaaatgtgatgggatccacggtggacggccggcccgtacagcccgcgaactcttcaaccctgacctatgcaaccctgagctcctcgtcggtggacgcagctgccgccgcagctgctgcttctgccgccagcgccgtgcgcggaatggccatgggcgccggctattacggcactctggtggccaactcgagttccactaataatcccgccagcctgaacgaggagaagctgctgctgttgatggcccagctcgaggccttgacccagcgcctgggcgagctgacccagcaggtggctcagctgcaggagcagacgcgggccgcggttgccacggtgaaatccaaataa

SEQ ID NO: 1374 - DNA, 1452 bp, Adenovirus E4
  MISC_FEATURE (1)..(1452): E4.orf00055 E1B 55K protein
atggagtcaagaaacccatttcagcagggattaccagctggatttcttagcagtagctttgtggagaacatggaagtgccagcgcctgaatgcaatctccggctacttgccggtacagccgctagacactctgaggatcctgagtctccagcagcaggaggatcaagaagagaatccgagagccggcctggaccctccggcggaggagtagctgacctgtttcctgaactgcaccgggtgctgactaggtcttcgagtggtcgggagaggggtattaagcgggagaggcatgatgagactaatcacagaattgaactgactgtgggtctgatgagccgcaagcgtccagaaacagtgtggtggtatgaggtgcagtcaactggcacagatgaggtgtcagtcatgcatgagagattttccctagaacaagtcaagacttgttggttggagcctgaggatgattgggaggtagccatcaggaattatgccaagctggctctgaggccagatagaaagtacaagattactaagctgataaatatcagaaatgcctgctacatctcagggaatggggctgaagtggagatctgtctccaggatagagtggctttcagatgctgcatgatgaatatgtacccgggagtggtggacatggatggggtcacctttatgaacatgaggttcaggggagatgggtataatgggacggtctttatggccaataccaagctgacagtgcatggatgctccttctttgggtttaataacacctgcatcgaggcttggggtcaggtcggtgttaaggggtgcagtttttcagccaactggatgggggtagtgggcaggaccaagagtatgctgtctgtgaagaaatgcttgtttgagaggtgccacctgggggtgatgagcgagggcgaagccagaatccgccactgtgcctctaccgagacgggctgttttgtgctgtgcaagggcaatgccaagatcaagcataatatgatctgtggagcctcggacgagcgcggctaccagatgctgacctgcgccggtgggaacagtcatatgctggccgccgtgcatgtggcttcccattcccgcaagccctggcctgagttcgagcacaatgtcatgaccaggtgcaatatgcatctgggggctcgccgaggcatgtttatgccctaccagtgcaacctgaattatgtaaaggtgctcctggagcccgatgtcatgtccagagtgagcctgacgggggtgtttgacatgaatgtggaagtgtggaagattctaagatatgatgaatacaagaccaggtgtcgagcctgcgagtgcggagggaagcatgccaggttccagcccgtgtgtgtggatgtgacggaggacctgcgacccgatcatttggtgttgtcctgcaccgggacggagttcggctccagtggggaagaatctgactag

SEQ ID NO: 1375 - DNA, 579 bp, Adenovirus E4
  MISC_FEATURE (1)..(579): E4.orf00058 E1A
atgaggcacctaagagacctgcccgatgaggaaattatcatcgcttccgggagcgagattctggaactggtggtaaatgctatgatgggcgacgaccatccggaaccccccaccccatttgagacaccttcgctgcacgatttgtatgatctggaggtggatgtgcccgaggacgaccccaacgagaaggcggtaaatgatttatttagcgatgccgcgctgctagctgccgaggaggcttcaagccctagctcagacagcgactcttcactgcatacccctagacacgacagaggtgagaaagagatccccgggcttaaatgggaaaagatggacttgcgttgctatgaggaatgcctgcccccaagcgatgatgaggacgagcaggcgattcagaacgcagcgagccatggagtgcaagccgtcagcgagagctttgcactggactgcccgcctttgcccggacacggctgtaagtcttgtgaatttcatcgcatcaatactggagataaagctgtgttatgtgcactttgctatatgagagcgtacaaccattgtgtttacagtaagtgtgattaa

SEQ ID NO: 1376 - DNA, 381 bp, Adenovirus G52
  MISC_FEATURE (1)..(381): G52.orf00001 E4 ORF1 protein
atggctgatcaacatatatatgtgcatttgctgggacgtcgggcctttttgccccagcaacagggttattctaatatgtatgttcttttttcaccggaggattttgtgcttgctcccagagggattattttgctgtctttgcagctgtcgttggatattcccactgggtatctgggacgttttttttctgtggcggatatgaatgtgaggggggtattgctgtgtgctcaggagatccaaccgagtacatggtgggaagtttctgttgttctttttaatcattcggatgaattttaccgcggttcccggggacagccggttgcttgcctgctgctggagcgtgtcatatatcccaccgttcgccaagcttctttagtttaa

SEQ ID NO: 1377 - DNA, 393 bp, Adenovirus G52
  MISC_FEATURE (1)..(393): G52.orf00002 E4 ORF2 protein
atgtatctgagccgccctattttttttgctgtgcatattcccgcacagttgcttcagtacttgcacggactgaatatagaagtactggactttttaaaggagcagcttagtgatttttggctgaacattttacactgtgttactcccattcatcagttttgctactcgggagcggttctagtgagtttggcgccatccctggaacttttgtgctgcgtagccacacctgatttagttcctagcgcggagttaacagatttagtcggcgcagatctatttaattatttgcaaatgaccttgcggatggagattcgcgatcgcggagagcaacctgacctgggtctgttaaatctgctgcaggtgtctcaggagcccgatatcttgcagtcatga

SEQ ID NO: 1378 - DNA, 351 bp, Adenovirus G52
  MISC_FEATURE (1)..(351): G52.orf00003 E4 ORF3 protein
atgatggtgtgtctacgcatggctatagagggcgccctttcggagctttttaatatgcacggcatgaaccttcagactatttgccgcgacatcattcgcgagtggagaaatgaaaattacttgggcattgtacagtcctgcagcttgatgatcgaagagtttgataataacgcttttgctttgctggtgtttgtggaagtgcgggtccaggctcttttggaggccgcgattgatagcctggaaaatcgcataatgtttgatctggctgttaaattccatcagggctccggaggcgaccgttgtcatcttcgggatcttcatttcgacccgttggtgaatcgcttggaataa

SEQ ID NO: 1379 - DNA, 861 bp, Adenovirus G52
  MISC_FEATURE (1)..(861): G52.orf00005 E4 34K protein
atgcaacgcgacagacggtatcgctgcagactggctccctacaatcgtcaccagctaccaccttgtgaggaccgcggcagtgctgttgtagaggagaactctcggtacttagaatgtgaaaatatgaacatgcacaatgttagtgaggtgaggagtataccatcttgtattagctttattgtactgcaggagtggcccgtgtattgggattgtattttaacggcctgggaaaaacatgtgatgaaaatgtatatgaaagtgtgtatctgctgtgccacgttagatctggatttccatcagaccattaggggttatgagagatggattattcactgtcattgtaactctcccggttctcttcagtgtagagctggtggggcggtgttagctaattggtttaagatggctatctatggctccctgataaatgtgaggtttccctggtacaggcaggtggtgaacaggggactgccccgggaggttctgtatgcgggtagcatgtttgtacgcggcagacacctgatttatgttaaagtaaggttggacggacacgcggtggcgctgttggagcgaatgagctttggctggagcgtgttcagctatgggatcatgaacaacctgattgtgatggtgtgcgattcttgccggaatctcagtgagattcagatgcgctgctgcgccagacgcactcgtagactgatgatccatgctgtgaggctgctggacaatctaacttcttaccagcctcacaggagtcgcaccgagaggttcagacagcgccacctgcgtggtttagtggaacatcatcgcacctttaccctgtctgagtttgatcggggagataacccgtggagagcctga

SEQ ID NO: 1380 - DNA, 207 bp, Adenovirus G52
  MISC_FEATURE (1)..(207): G52.orf00006 E4 ORF6/7 protein
atgcagtttttcaccgaaacgttggagaacctgccccagggatttgtgtccatcacggatcgacatctgattaccaaagagactgtttggatcttaactcccaaataccggactggctcgcagcagtttactgccatgaagggagagaggctggtgtatgctgtcaaatggaagggcggaggaagccttactgtgcgtgtaaaataa

SEQ ID NO: 1381 - DNA, 1683 bp, Adenovirus G52; identical to SEQ ID NO: 160
  MISC_FEATURE (1)..(1683): G52.orf00010 L5 fiber protein

SEQ ID NO: 1382 - DNA, 1092 bp, Adenovirus G52
  MISC_FEATURE (1)..(1092): G52.orf00012 L5 fiber
atgaaaagaacccgagttgatgaagacttcaaccccgtctacccttatgacaccacaaccactccagccgttcctttcatatcacccccgtttgtaaacagtgacggtcttcaggaaaacccccccggagttttaagcctgcgaatagctaaacccctgtattttgacatggagagaaaactagccctttcacttggaagagggctaacaattaccgcgaacggacagttagaaagcacccagagcgtgcagactaacccgccgttaactgtcaccaataacaacacacttatcctacgctactcctcccctttaatcctaactgacaataatttaaccgtaggcttctcaagtcctctccgtgttatagacaacaaactgacattcacttttacctcacctctccgttatgaaaacgaaacccttaccttcaattacacagagccccttacacttatgaacagcaaccttgcgcttaacgtaaactcctctaaaggccttagggttgacgggggctcactaggtacaaacctaagtcctgacttaaggtttaacagcagtggagccatagcttttggtatacaaaccctatggacacccccgacctcaaatcctaactgcaccgtttacaccgaaagcgattccttacttagtctctgtttaactaaatgcggagctcacgttttaggaagtgtaagcttaaccggggtagcaggtaccatgacaaacatggctgaaacttcgcttgctattgaatttacgtttgacgacactggaaaactacttcactcaccacttgttaacaacacttttagcattcgtcagggcgacagccccgcctcaaatcctacctacaatgctctagcatttatgccaaacagtaccctctacgctagaggaggaagtggtgaaccccgaaacaattactacgtccaaacatacctcaggggaaatgttcagagaccgattaccctcactgttactttcaactcagccgccacggggtattccttatcttttaagtggactgctgttgtacgtgaaaaatttgcagctcctgcaacttcattttgctacattaccgaacaataa

SEQ ID NO: 1383 - DNA, 162 bp, Adenovirus G52
  MISC_FEATURE (1)..(162): G52.orf00013 U protein
atgaaaattgtgggtgaggacaaggaagtggataccgatatttctttcagggtttggaggaagtttgccgcccaccatcatatcccatatgagagttgggaagagggtaaagtggtgctgctgaatgataataccaaaaaattgctgtcaaatttaaggtaa

SEQ ID NO: 1384 - DNA, 375 bp, Adenovirus G52
  MISC_FEATURE (1)..(375): G52.orf00014 E3 14.7K protein
gtggagatgactgactctcaggacattaatattagtgtggaaagaatagctgctcagcgtcagcgagaaacgcgagtgttggaatacctggaactacagcaacttaaagagtcccactggtgtgagaaaggagtgctgtgccatgttaagcaggcagccctttcttacgatgtcagccttcagggacatgaactgtcttacactttgccttcgcaaaaacaaaccttctgcaccatgatgggctctacctccatcacaatcacccaacaaaccggacctgttgagggagctatcctgtgtcactgtcacgcgcctgattgtatgcccaagctaatcaaaactctctgtgctttaggtgatatatttaaaatgtaa

SEQ ID NO: 1385 - DNA, 273 bp, Adenovirus G52
  MISC_FEATURE (1)..(273): G52.orf00015 E3 RID-alpha
atggtagctgcatttctacttctcctctgtctacccatcattttcgtctcttcaactttcgccgcagtttcccacctggaaccagagtgcctaccgccttttgacgtgtatttgattctcacctttgtttgttgtatatccatttgcagtatagcctgcttttttataacaatctttcaagccgccgactatctttacgtgcgaattgcttactttagacaccatcctgaatacagaaatcaaaacgttgcctccttactttgtttggcatga

SEQ ID NO: 1386 - DNA, 813 bp, Adenovirus G52
  MISC_FEATURE (1)..(813): G52.orf00016 E3 CR1-beta1
atgcttgttatcctcctgctcgccacatttttcgctctctctcacgccagaacaagtattgttggcgcaggttacaatgcaactcttcaatctgcttacatgccagattccgaccagataccccatattacgtggtacttacaaacctccaaacctaattcttcattttatgaaggaaacaaactctgcgatgactccgacaacaggacgcacacatttccccacccttcactacaattcgaatgcgtaaacaaaagcttgaagctttacaacttaaagccttcagattctggcttgtatcatgctgtagttgaaaaaagtaatttagaagtccacagtgattacattgaattgatggttgtggacctgccacctccaaaatgtgaggtttcctcctcttaccttgaagttcaaggcgtggatgcctactgcctcatacacattaactgcagcaactctaaatatccagctagaatttactataatggacaggaaagtaatcttttttattatttaacaacaagcgctggtaacggtaaacagttacctgattattttactgctgttgttgaattttccacctacagagaaacgtatgccaagcggccttacaatttctcatacccgtttaacgacctttgcaatgaaatacaagcgctcgaaactggaactgattttactccaattttcattgctgccattgttgtgagcttaattaccattattgtcagcctagcattttactgcttttgcaagcccaaaaaacctaagtttgaaaaacttaaactaaaacctgtcattcaacaagtgtga

SEQ ID NO: 1387 - DNA, 519 bp, Adenovirus G52
  MISC_FEATURE (1)..(519): G52.orf00018 E3 CR1-alpha1
atgaagatctgtgttgtcatctttgcgctcagtttaataaaaactgaactttttgccgcaccttcaacgccatctgtgatttctacaacaaaaagttcttctggcaaaggtacacaaactgtattttattctaattctacctcatctatcgtgctgaactgcgcctgcactaacgaacttatccagtggattgcaaacggtagtgtgtgcaagtacttttgggggaacgagatagttagtagaaataacagcctttgcgagcactgcaactcctccacactaatcctttatcccccatttgttactggatggtatatgtgcgttggctccggtttaaatcctagttgctttcataagtggtttctacaaaaagagacccttcccaacaattctgtttctttttccaccctgtcctactgctgttctccctctggttactctttcaaacctctaattggtattttagctttgatactgataatctttattaactttataataattaacaccttacagtaa

SEQ ID NO: 1388 - DNA, 318 bp, Adenovirus G52
  MISC_FEATURE (1)..(318): G52.orf00020 E3 12.5k
atgacagatggtgcggccgtgagagctcggctgcgacatctgcatcactgccgtcagcctcgctgctacgctcgggagccgatcgtcttcagctactttgagctgccggacgagcaccctcagggaccggctcacgggttgaaactcgagatcgagaacgcgctcgagtctcgcctcatcgacgccttcgccgcccggcctctcctggtagaaaccgaacgcgggaccactaccatcaccctgttctgcatctgccccacgcccggattacatgaagatctgtgttgtcatctttgcgctcagtttaataaaaactga

SEQ ID NO: 1389 - DNA, 702 bp, Adenovirus G52
  MISC_FEATURE (1)..(702): G52.orf00021 pVIII
atgagcaaggagattcccaccccctacatgtggagttatcagccccagatgggtctggccgcgggggccgcccaggactactccagcaagatgaactggctcagcgccggcccccacatgatctcacgagttaacggcatccgagcccaccgaaaccagattctcttagaacaggcggcaatcaccgccacaccccggcgccaactcaacccgcccagttggcccgccgcccaggtgtatcaggaaactccccgcccgaccacagtcctcctgccacgcgacgcggaggccgaagtcctcatgactaactctggggtacaattagcgggcgggtccaggtacgccaggtacagaggtcgggccgctccttactctcccgggagtataaagagggtgatcattcgaggccaaggtatccagctcaacgacgaggcggtgagctcctcaaccggtctcagacctgacggagtcttccagctcggaggagcgggccgctcttccttcaccactcgccaggcctacctgaccctgcagagctcttcctcgcagccgcgctccgggggaatcggcactctccagttcgtggaagagttcgttccctccgtctacttcaacccgttctccggctcacctggacgctacccagacgccttcattcccaactttgacgcagtgagtgaatccgtggacggctacgactga

SEQ ID NO: 1390 - DNA, 357 bp, Adenovirus G52
  MISC_FEATURE (1)..(357): G52.orf00023 33K protein
gtgtggccttccctcgcaacgttctctattattaccgtcatctctacagcccctacgaaacgctcggagaaaaaagctaaggcctcctctgccgcgaggaaaaactccgccgccgctgccgccaaggatccaccggccaccgaggagctgagaaagcgcatctttcccactctgtatgctatctttcagcaaagccgcgggcagcaccctcagcgcgaactgaaaataaaaaaccgctccttccgctcactcacccgcagctgtctgtaccacaagagagaagaccagctgcagcgcaccctggacgacgccgaagcactgttcagcaaatactgctcagcgtctcttaaagactaa

SEQ ID NO: 1391 - DNA, 135 bp, Adenovirus G52
  MISC_FEATURE (1)..(135): G52.orf00024 22K protein
atgacggtaataatagagaacgttgcgagggaaggccacaccgtgatggaagaggaggtagcgtcgggcaaaggagatgtttcccccgcagtgttgcaagcagttcacgatactgcttttgtgggcccgccatga

SEQ ID NO: 1392 - DNA, 2295 bp, Adenovirus G52
  MISC_FEATURE (1)..(2295): G52.orf00026 100K protein
atggagcttatgcgcgaggaaactttaaccgccccgtcccccgtcagcgacgaagatgtcatcgtcgaacaggacccgggctacgttacgccgcccgaggatctggaggggcctgaccggcgcgacgctagtgagcggcaggaaaatgagaaagagaaggcacagggctgctaccttctggacggcgacgttttgctaaagcatttcgccaggcagagcaccatagtcaaggaggccttgcaagaccgctccgaggtgcccttggacgtcgccgcgctctcccaggcctacgaggcgaaccttttctcgccccgagtgcctccgaagagacagcccaacggcacctgcgagcccaacccgcgactcaacttctaccccgtattcgccgtgcccgaggcgctggccacctatcacatctttttcaaaaaccagcgcatccccctctcgtgccgggccaaccgcaccgcggccgataggaagctcaggcttaaaaacggagccgacatacctgatatcacgtcgctggaggaagtgcccaagattttcgagggtctgggtcgagatgaaaagcgggcggcgaacgctctgcagaaagaacagaaagagagtcagaacgtgctggtggagctggagggggacaacgcgcgtctggccgtcctcaaacgctgcatagaagtctcccacttcgcctaccccgccctcaacttgccacccaaagttatgaaatcggtcatggatcagctgctcatcaagagagctgagcccctggatcccgaccaccccgaggcggaaaactcagaggacggaaagcccgtcgtcagcgacgaggagctcgagcggtggctggaaaccagggacccccaacagttgcaagagaggcgcaagatgatgatggcggccgtgctggtcaccgtggagctggaatgcctgcaacggtttttcagcgacgtggagacgctacgcaaaatcggggagtccctgcactacaccttccgccagggctacgtccgccaggcctgcaagatctccaacgtggagctcagcaacctggtctcctacatgggcatcctccacgagaaccgactggggcagagcgtgctgcactgcaccttgcaaggcgaggcgcggcgggactacgtgcgagactgcatctacctcttcctcaccctcacctggcagaccgccatgggcgtctggcagcagtgcttggaagagagaaacctcaaagagctagacaaactcctctgccgccagcggcgcgccctgtggtccggtttcagcgagcgcacggtcgccagcgctctggcggacatcatcttcccggagcgcctgatgaaaaccttgcaaaacggcctgccggatttcatcagtcaaagcattttgcaaaacttccgctcttttgtcctggaacgctccgggattttgcccgccatgagctgcgcgctaccctctgactttgtccccctctcctaccgcgagtgccctcccccactgtggagccactgctacctcttccaactggccaactttctggcctaccactccgacctcatggaagacgtaagcggagagggtttactggagtgccactgccgctgcaacctgtgcaccccccacagatcgctggcctgcaacaccgagctgctcagcgaaacccaggtcataggtaccttcgagatccagggaccccagcagcaagagggtgcttccggcttgaagctcactccggcgctgtggacctcggcttacttacgcaaatttgtagccgaggactaccacgcccacaaaattcagttttacgaagaccaatctcgaccaccgaaagcccccctcacggcctgcgtcatcacccagagcaagatcctggcccaattgcaatccatcaaccaagcgcgccgagatttccttttgaaaaagggtcggggggtgtacttagacccccagaccggcgaggaactcaacccgtccacactctccgtcgaagcagcccccccgagacatgccgcccaagggaaccgccaagcagctgatcgctcggcagagagcgaagaagcaagagctgctccagcagcaggtggaggacgaggaagagctgtgggacagccaggcagaggaggtgtcagaggacgaggaggagatggaaagctgggacagcctaggcgaggaggaggacgagctttcagaggaagaggcgaccgaagaaaaaccacctgcatccagcgcgccttctctgagccgacagccgaagccccggcccccgacgcccccggccggctcactcaaagccagccgtag

SEQ ID NO: 1393 - DNA, 1389 bp, Adenovirus G52
  MISC_FEATURE (1)..(1389): G52.orf00030 DNA binding protein
atggccaaccgtcagaaccaagcaggcagctccataaccccctacttgcgggagatgagccccgagcgcgagcaggaggtgcctccgctccctcccaagaagaaggctcgcaaggcaacacttgcgccgccgccatccccggagattgtctccgacagcgagggcgaaggcaccgtggtggaggtgggcttcagctaccctccgatgcgcagagtacgccgcgcggacggcaccgtggagtttcaaagaatgaccatgaaggacgtcggggccggcgagggcccctccaccgccgtgttggtgaagaaccccgagagcgcgccgctggtgactgcctgggagaagggcatggaagtcatgacggtgttgatggagaagttccacgtggacaacgagagcagaggggcttttaagtttctgcccgaccagggagccgtgtaccgcaagatctgtcaaacttggttgaacgaggagcaccgcggcctgccgctgaccttcaccaaccagaagaccttcaccgagctgatgggcagattcctcatggcttacatggaagcatacgcgggggtgaaacgcaagagctgggagcccaccgggtgcgccgtgtgggagcatcgcaatacccggcaggagggcgtcctgttctgcttccacggagtggagatggtctgcaaggagcacgtggtggaaatggatgtgaccagcgagaacggtcagcgggcgttgaaggagcatcctacgaaagccaaggtggtccagaaccgctggggtcgcaacgtggttcagctgaagaatgaagacgcccgctgctgctcggaagacatcaactgcggcaataacgtattctctagcaagtcctgtgggctctttttcaccgagggcacgaaggcccagatggccttccgtcagatggaggagttcctggcagcgagttaccctatcatgcaacgcgggcagcgtcgcatcctgatccctctgcgctgcgattgcctcaacaaacccgacctggtgccccagatcgggcggcagatgtgcaagctgaccccgttcgccctgagcaacgccgaggatctggatgcgtcggaggtgaccgacccaacggccctggctagtattcacaaccccagcgtgatggtgttccagtgtgccaaccccgtgttccgcaacagccgcgggagctccggccctaactgcgacttcaagatatcggcgcccgacgtcatgggagccctgcagctggtgcggcagttttggaagcagaacctagaagacgtgcccctgccgcggctggtgatccccgagtttcgttggagcgcccgtttccagtatcgcaacgtgtccctccccagtgggcacgaggacccctccctcgaacccttcgatttttaa

SEQ ID NO: 1394 - DNA, 501 bp, Adenovirus G52
  MISC_FEATURE (1)..(501): G52.orf00032 L3 protease
gtgccatcgttaacacggccggacgggaaaccggggggggtccactggctcgccttcgcctggaacccgcgtaaccgcacctgctacctgttcgacccttttggtttctccgacgaaaggctgaagcagatctaccagttcgagtacgaggggctcctcaagcgcagcgctctggcctccacgcccgaccactgcgtcaccctggaaaagtccacccagacggtccaggggcccttctcggccgcctgcgggctattctgttgcatgtttttgcacgccttcgtgcactggcctcacacccccatggatcacaaccccaccatggatctgctcaccggagtgcccaacagcatgcttcacagcccccaggtcgcccccaccctgcgccgtaaccaggaacacctgtatcgctttctggggaaacactctgcctattttcgccgccaccggcagcgcatcgaacgggccacggccttcgaaagcatgagccaaagagtgtaa

SEQ ID NO: 1395 - DNA, 2763 bp, Adenovirus G52; identical to SEQ ID NO: 220
  MISC_FEATURE (1)..(2763): G52.orf00034 L3 hexon

SEQ ID NO: 1396 - DNA, 834 bp, Adenovirus G52
  MISC_FEATURE (1)..(834): G52.orf00035 pVI
atggaagacatcaattttacgtcgctggctccgcggcacggctcgcggccgctcatgggcacctggaacgacatcggcaccagtcagctcaacgggggcgctttcaattgggggagcctttggagcggcattaaaaactttggctccacgattaaatcctacggcagcaaagcctggaacagtagtgctggtcagatgctccgagataagctgaaggacaccaactttcaagaaaaagtggtcaacggggtggtgaccggcatccacggcgcggtagatctcgccaatcaagcggtgcagaaagagattgataggcgtttggaaaattcgcgggtaccgccgcagaggggggatgaggtggaggtcgaggaagtagaagtagaggaaaagctgcccccgctggagaaagttcccggtgcgcctccaagaccgcagaagcggcccaggccagaactagaagaaactctggtgacggagagcaaggagcctccctcgtacgagcaagccttgaaagagggcgcctctccaccctcctacccgatgactaagccgatcgcacccatggctcgaccggtgtacggcaaggattacaagcccgtcacgctagagctgcccccaccgcccccttcgcgtccgacagtgcctccactgcctgccccgtcggcgggtcccgtgtctgcaccatccgctgtgcctctgccagccgcccgtcccgtggccgtggccactgccaggaaccccagaggccagagaggagccaactggcaaaacacgctgaacagcatcgtgggcctgggggtgaaaagcctgaaacgccgccgttgctattattaa

SEQ ID NO: 1397 - DNA, 213 bp, Adenovirus G52
  MISC_FEATURE (1)..(213): G52.orf00036 pX
atggctctgacttgccgcgtgcgccttcccgttccgcactatcgaggaagatctcgtcgtaggagaggcatggcgggcagtggtcgccggcgggctttgcgcaggcgcatgaaaggcggaattttacccgctctgatacccataatcgccgccgccatcggtgccatacccggcgtcgcttcagtggccttgcaagcagctcgtaataaataa

SEQ ID NO: 1398 - DNA, 1038 bp, Adenovirus G52
  MISC_FEATURE (1)..(1038): G52.orf00037 V
atgagcaagcgcaagtttaaagaagaactgctgcagacgctggtgcctgagatctatggccctccggacgtgaagcctgacattaagccccgcgatatcaagcgtgttaaaaagcgggaaaagaaagaggaactcgcggtggtagacgatggcggagtggaatttattaggagttttgccccgcggcgcagggttcagtggaaagggcgacgggtacaacgcgttttgaggccgggcaccgcggtagtttttaccccgggagaacggtcggccgttaggggtttcaaaaggcagtacgacgaggtgtacggcgacgaggacatattggaacaggcggctcaacagattggagaattcgcctatggaaagcgctcgcgtcgcggagacttggccatcgctttagacagcggcaatcccacacccagcctcaaacccgtgacactgcaacaagtgctccccgtgagcgccagcacggacagcaagaggggaataaaaagagaaatggaagatctgcagcctaccatccagctcatggttcctaaacggcagaggctggaagaggtcctggagaagatgaaagtggaccccagcatagagccggacgtcaaagtcaggccgatcaaagaagtggcccctggactcggggtgcagacggtggatatccagatccccgtcacgtcagcttcaaccgccgtggaagccatggaaacgcaaaccgaaacccccgccgcggttggtaccaaagaagtggcgttgcaaaccgacccctggtacgaatttgccgccccccggcgtcagaggcgacccgctcgttacggccccgccaatgccatcatgccagaatatgcgctgcatccgtctatcctgcccacccccggctaccggggagtgacgtatcgcccgtcgggaacccgccgccgaacccgtcgccgccgccgctcccgtcgcgctctggcccccgtgtcggtgcgccgcgtgacccgccggggaaagacagtcaccattcccaacccgcgctaccaccctagcatcctttaa

SEQ ID NO: 1399 - DNA, 564 bp, Adenovirus G52
  MISC_FEATURE (1)..(564): G52.orf00038 pVII
atgtccatcctcatctctcccgataacaacaccggctggggactgggctccggcaagatgtacggcggagccaaaaggcgctccagtcagcacccagttcgagttcggggccacttccgcgctccctggggagcttacaagcgaggactctctggccgaacggctgtagacgataccatagatgccgtgattgccgacgcccgccggtacaaccccggaccggtcgctagcgccgcctccaccgtggattccgtgatcgacagcgtggtggccggcgctcgggcctatgctcgccgcaagaggcggctgcatcggagacgtcgccccaccgccgccatgctggcagccagggccgtgctgaggcgggcccggagggtaggcaggagggctatgcgccgcgctgccgccaacgccgccgccggcagggcccgccgtcaggctgcccgccaggccgccgctgccatcgctagcatggccagacccaggagagggaacgtgtactgggtgcgcgattctgtaacgggagtccgagtgccggtgcgcagccgacctccccgaagttag

SEQ ID NO: 1400 - DNA, 1512 bp, Adenovirus G52
  MISC_FEATURE (1)..(1512): G52.orf00039 III
atgagaagagcggtgagagtcacgccggcggcgtatgagggtccgcccccttcttacgaaagcgtgatgggatcagcgaacgtgccggccacgctggaggcgccttacgttcctcccagatacctgggacctacggagggcagaaacagcatccgttactccgagctggcgcccctgtacgataccaccaaggtgtacctggtggacaacaagtcggcggacatcgcctccctgaattaccaaaacgatcacagcaactttctgactaccgtggtgcagaacaatgacttcaccccgacggaggcgggcacgcagaccattaactttgacgagcgttcccgctggggcggtcagctgaaaaccatcctgcacaccaacatgcccaacatcaacgagttcatgtccaccaacaagttcagggccaggctgatggttaaaaaggctaaaaaccagcctcccgagtacgaatggtttgagttcaccattcccgagggcaactattccgagaccatgactatcgatctgatgaacaatgcgatcgtggacaattacctgcaagtggggaggcagaacggggtgctggagagcgatatcggcgtaaaatttgataccagaaacttccgactggggtgggatcccgtgaccaagctggtgatgccaggcgtgtacaccaacgaggcttttcaccccgacatcgtgctgctgccggggtgcggtgtggacttcactcagagccgtttgagtaacctgttagggatcagaaagcgccgccccttccaagagggctttcagatcatgtatgaggacctggaaggaggtaacattccaggtttgctagacgtgccggcgtatgaagagagtgttaaacaggcggaggcgcagggacgagagattcgaggcgacacctttgccacggaacctcacgaactggtaataaaacctctggaacaagacagtaaaaaacggagttacaacattatatccggcactatgaataccttgtaccggagctggtttctggcttacaactacggcgatcccgagaagggagtgagatcatggaccatactcaccaccactgacgtgacctgcggctcgcagcaagtgtactggtccctgccggatatgatgcaagacccggtcaccttccgcccctccacccaggtcagcaactttccggtggtgggcaccgagctgctgcccgtccatgccaagagcttctacaacgagcaggccgtttactcgcaactcattcgccagtccaccgcgcttacccacgtgttcaatcgctttcccgagaaccagattctggtgcgccctcccgctcctaccattaccaccgtcagtgaaaacgttcccgccctcacagatcacggaaccctgccgctgcgcagcagtatcagtggagttcagcgcgtgaccatcaccgacgccagacgtcgaacctgtccctacgtttacaaagctcttggcgtagtggctcccaaagttctctctagtcgcaccttctaa

SEQ ID NO: 1401 - DNA, 1710 bp, Adenovirus G52
  MISC_FEATURE (1)..(1710): G52.orf00040 pIIIa
atgcagcggccggcggacggggccaccgcggatcccgcaattttggcatccctgcaaagtcaaccttcgggcgtgaccgcctccgatgactgggcggcggccatggaccgcatcatggcgctgaccacccgcaaccccgaggcttttaggcagcaaccccaggccaaccgtttttcggccatcttggaagcggtggtaccgtcgcgcaccaacccgacgcacgagaaagtcctgactatcgtaaacgccctggtagacagcaaagctatccgccgcgacgaggcggggctgatctacaacgctctgttggaacgggtggcgcgctacaacagcactaacgttcagaccaatctggatcgcctcaccaccgacgtgaaggaggcgctggctcagaaggagcggtttctgagggacagcaatctgggatctctggtggcactcaacgccttcctgagcacgcagccggccaacgtgccccgcgggcaggaggactacgtgagcttcatcagcgctctgaggctgctggtgtccgaggtgccacagagcgaggtgtaccagtctgggccggattacttcttccagacgtcccgacagggcttgcaaacggtgaacctgactcaggcctttaaaaatttgcaaggcatgtggggcgtcaaggccccggtgggcgatcgcgccactatctccagtctgctgacccccaacactcgcctgctgctgctcttgatcgcgccgttcaccaacagtagcactatcagccgtgactcgtacctgggtcatctcatcactctgtaccgcgaggccatcggccaggctcagatcgacgagcatacgtatcaggagatcactaacgtgagccgggccctgggtcaggaagatatcggcagcctggaagccacgttgaactttttgctaaccaaccggaggcaaaaaataccctcccagttcacgttaagcgccgaggaggagaggattctgcgatacgtgcagcagtccgtgagtctgtacttgatgcgggagggcgccaccgcttccacggctttagacatgacggctcggaacatggaaccgtccttttactccgcccaccgaccgttcattaaccgtttgatggactacttccatcgcgcggccgccatgaacggggagtattttaccaatgccatcctgaatccgcattggatgcccccgtccggcttctacaccggggagtttgacctgcccgaagccgacgacggctttctgtgggacgacgtgtccgatagcattttcacgccggctaatcgccgattccagaagaaggagggcggagacgagctccccctctccagcgtggaagctgcctctaggggagagagcccctttcccagtctgtcttccgccagcagtggtcgtgtcacgcgcccacggttgccgggggagagcgactacctgaacgaccccttgctgcggccggctaggaagaaaaatttccccaacaacggggtggaaagcttggtggataaaatgaatcgttggaagacctacgcccaggagcagcgggagtgggaggacagtcagccgcgaccgctggttccgccgcactggcgtcgccagagagaagacccggacgactccgcagacgatagtagcgtgttggacctgggagggagcggagccaacccctttgctcacttgcaacccaaagggcgttcgagtcgcctgtactaa

SEQ ID NO: 1402 - DNA, 1128 bp, Adenovirus G52
  MISC_FEATURE (1)..(1128): G52.orf00042 52 kDa protein
atgcatccggtgctgcggcagatgcgaccccagacgcccaccaccaccgccgcggcggcagtaaacctgagcggaggcggtgacagggaggaggaggagctggctttagacctggaagagggagaggggctggcccggctgggagcgccgtccccagagagacaccctagggttcagctcgtgagggacgccaggcaggcttttgtgccgaagcagaacctgtttagggaccgcagcggtcaggaggcggaggagatgcgcgattgcaggtttcgggcgggtagagagctgagggcgggcttcgatcgggagcggctcctgagggcggaggatttcgagcccgacgagcgttctggggtgagcccggcccgcgctcacgtctcggcggccaacctggtgagcgcgtacgagcagacggtgaacgaggagcgcaacttccaaaagagctttaacaatcacgtgaggaccctgatcgcgagggaggaggtgaccatcgggctgatgcatctgtgggacttcgtggaggcctacgtgcagaacccggccagcaaacctctgacggcccagctgttcctgatcgtgcagcacagccgcgacaacgaaacgttccgcgacgccatgttgaacatcgcggagcccgagggtcgctggctcttggatctgattaacatcctgcagagcatcgtggtgcaggagaggggcctgagtttagcggacaaggtggcggccattaactattcgatgcagagcctggggaagttctacgctcgcaagatctacaagagcccttacgtgcccatagacaaggaggtgaagatagacagcttttacatgcgcatggcgctgaaggtgctgacgctgagcgacgacctcggcgtgtaccgtaacgacaagatccacaaggcggtgagcgccagccgccggcgggagctgagcgacagggagctgatgcacagcctgcagagggcgctggcgggcgccggggacgaggagcgcgaggcttacttcgacatgggagccgatctgcagtggcgtcccagcgcgcgcgccttggaggcggcgggctaccccgacgaggaggatcgggacgatttggaggaggcaggcgagtacgaggacgaagcctga

SEQ ID NO: 1403 - DNA, 1896 bp, Adenovirus G52
  MISC_FEATURE (1)..(1896): G52.orf00045 DNA terminal protein
gtgcccaccatggaacgctttcgccccctgcgcaacatctggaaccgcgttcgcgaattcaccagggccgcgaccacctcggccggcatcacctggctctcccgctacatctaccactaccatcgcctcatgctggacgacctgtcccccggcgcccccgccaccgtcggctggcccctgtaccgagagccgcctcctcacttcctggtcggctaccagtatctggtgcgcacatgcaacgactacgtgttcgagtccagggcctactcgcgcctcaagtacacggagatcacccaacccggcatgcaagtcgtgaactggtccgtcatggccaactgcacctacaccatcaacacgggggcctatcaccgcttcgtggacctggacgacttccagaccaccctcacgcagattcaacaggccgtgctggccgagagggtcgtggccgacctagcgttgctgcagcccctgcgggggttcggctcgactcgcatggcagacaggggagaagcagaggttccggtggagagactgatgcaagactactacaaagacctgcgtcgctgtcagagcgaggcctggggcatggccgagcgcctgcgcattcaacaggccgggcccaaagacgtggtcctcctcgccaccatccgccgcctgaagaccgcctactttaattacatcatcagcagcatcacctcccaactgcccgcggacgccccccagcggcccaccgtcctcagcttaccttgcgattgcgattggatagacgctttcctagagaagttctcggatcccgtcgacctcgacgttctcagatccctgcacggagtgcctacgcagcaattgataaaatgcatcgtcagcgccgtgtccctgcccgacggccctaaccacttaccctccctgcacgggggcgctctgcgcggcggcgttttcgaactgcgacctcgcgaaaacggacgcgccgtcaccgagaccatgcgtcgccggcgcggcgaaatgatcgagcgcttcgtggaccgcctgccggtcagacgacgacgtcgccgccccgtccccgtcgcagagctggcggaggaacctgtgcccctggaagaggaggagccggaggaagaagcagaggcgcctcggggcgctttcgaacaggaggtacgcgacacggtcgccgatctcatccgcctcctgcaagaagaactcacggtagccgcccgcaactcccaatttttcaacttcgccgtcgacttctacgaggccatggagcgtctcgaagccatcggagacatcaacgagatgaccctgcgacgctggatcatgtacttcttcgtctgcgagcacatcgccaccacgctcaactacctctttcagcgcctcagaaactacgccgtcttcgcccgtcacgtggaactcaacgtggcccaggtggtcatgcgagcgcgcgactccttcggcaacgtggtgtacagccgcgtgtggaacgagaacggcctcaacgccttctctcaactcatgcgtcgcatctccaacgacctggccgccaccgtggagcgagcgggtcacggcgacctccgcgaggaagaagtggagcagttcatggccgagatcgcctatcaagacaactcgggcgacgtacaggagatcctcaggcaggccgccgttaacgatgcagacattgattctgtggaactctctttcaggttcaggacccggggaccggtggtcttcacgcagagacagcacatccaggacctcaaccgccgcgtcgtcgcccacgccagcagtctccgggctcgtcatcaaccgctgccgaatcctcacgaaaacgtgcctctgcctccatcgccccccggcgcagagccgcctctgccccccggcgctcgccctcgacgagtgagataa

SEQ ID NO: 1404 - DNA, 3327 bp, Adenovirus G52
  MISC_FEATURE (1)..(3327): G52.orf00048 DNA polymerase
gtggtagccccgcgcggacacggcctcctctacgccgtggacgcctcttccaacacccccctggaaatcaagtaccatttgcacctggctcacgctcttaccggtcttctgaaagtgaacttgcaaacgcttcccgtcgacctcagcgcggccgccctcgactccctggacagcgggcagctgcgccccctcctgcagcgcctgcgcccctccgtggcggagatctggacttgcggcacacggggcgtcgtcgtccccaccgtcgtccacccagagaagaagggcgcagacgcagactcccaccgccaaggcgaaggggatgccgccccaccaagcccccgtctcaacttccccctccggtttctggtgcgcgggcgaaaagcgcatctcattcaggagatacagagcgtgcagcgctgcgactactgcggtcgcttttacaaacatcagcacgaatgctctgtgcgccggcgggacttctactttcaccacatcaacacccattcctccaactggtggcaggagatcagcttcttcccgatcggctcccacgcgcgcacccagcggctctttgtcacctacgacgtagaaacctacacatggatgggctcgttcgggaaacagttggtacccttcatgctggtcatgcacgtctcgggcgaggagaccctcgttcgccaagcctgcgagctggccctagagctccgatgggacgtctggaacgaccgcccctgcactttctacgtggtgacgccggagaaaatggccgtggggaaaaagtttcgcgagtttcgcgaccgcttgcaaactctgctagcccttgacctatggagctctttcctcgcggctaaccctcagctctccgactgggcccgggcggagctgggtctctcctcgccggactgtctcacctacgaggagttgaaaaaagcgccggccctcaagggacagccgcgctttatcgaactttacatcgtgggccacaacatcaacggcttcgacgagatcgtcctggcggcgcaagtcatcaacaaccgctcggacgtacccggacccttcaggatctctcgcaacttcatgccccgtgccgggaaaatcctctttaacgacgtcaccttcgccctccccaatcccaggcagaaaaagcgcaccgacttcacgctgtgggaacagggtgcctgcgacgacacggacttcaaacatcagtacctgaaagtgatggtgcgggacaccttcgccctcacccacacctctctcagaaaggccgctcaagcgtacgccctgccggtagaaaaaggctgttgtccatacaaagccgtgaacgaattttacatgttaggttcttaccgagcggacgaaaaaggatttcccgccgaagagtactggaaagaccgcgaggaatacctcctcaatcgcgaactgtgggagaaaaaacaagagacggcctacaacctggtccgcgagacgttggactactgcgctctcgacgtgctggtaaccgcagccctggtggacaagctccgggaatcctacgcccagttcatccaagactccgtgggactgcccggggccaactttaacgtcttccaacgccccaccatctcttccaactcccacgccatcttcaggcagatcctctaccgggccgaaaaaccccgcaagacccacttgggagacgggctcatggctccctctcacgagatgtacgactacgtgcgagccagcatccgcggggggcgctgttaccccacttacatcggggtgttgagggagcccctgtacgtgtacgacatctgcggcatgtacgcctcggccctgacccaccccatgccctggggaccgcccctgaatccctacgaaagggccctcgcggtgaagaagtgggacgaggcgttgcaagacacggacacacaaatcgattattttaatcaggttttgctacccggcatcttcaccatcgacgccgaccccccgcccgccaacttgctagatcccctgcctccgttctgctccagaaaaggggggcgattgtgttggaccaacgagcccctccgcggggaggtggccaccagcgtggacctcatcaccctgcacaaccgcggctggcgcgtgcgcatcctgcccgacgagcgcaccgccgtgttccccgagtggcggtgcgtggcccgcgagtacgtgcaactgaacatcgccgccaaggagagggccgatcgggagaaaaatcagaccctgcgctccatcgccaagttgctttccaacgccctctacgggtctttcgccaccaaacttgacaataaaaagatcgtgttttctgatcagatggacccttccaccatcaaaagcatcgccgcggggcacgtgaatatcaaatcctcctctttcgtagaaactgacaacttgagcgccgagatcatgccggcttttgagagggcctactcacccgaacagctggctctggtccacagcgatgcggaagaaagtgacggggagggtgggcacgcccccttttatacccctttggggggtgcgggtcacgtgacctacacttacaagccaatcaccttcgtggacgcggaggaggacgacctgtgtctgcacaccctggaaaaggtggaccccctcattgaaaacgacagatacccctcgcagatcgcctccttcgtgttagcctggacccgagcctttgtctcggagtggtcccagttcctgtacgcggaagatctcggaacacctttggaagatcgccccctcaagtcggtctacggggacaccgacagcctttttgtcacggaagctggacacagactcatggagacgcaaggtaagaaacgcatcaaaaaaaatggaggcaacttggtttttgatcccgctaaacccgagctcacgtggctggtggagtgcgagaccgtctgcgctcagtgcggagccgacgcctactcgcccgagtcggtcttcctggcccccaaactctacgccctcaagtgtctgcactgcaccaaatgtcagcacgtttccaagggaaagctgcgcgccaagggacacgcggccgagtccctcagctacgacctcatgcttcgttgctatctggccgactcacagggagacgacgcccgcttcagcaccagcaggatgagcctgaagcgcaccctcgcaagcgcccagcccggggctcatcccttcaccgtcaccgagaccaccctcacccgaacactgagaccctggaaggacagaaccctcgcggccctggacgcccaccggctggtgccctacagcgaaagtcggcccaacccccgcaaccaagaagtctgctggatcgagattccatag

SEQ ID NO: 1405 - DNA, 1047 bp, Adenovirus G52
  MISC_FEATURE (1)..(1047): G52.orf00050 IVa2
atgcccatggcagacggcctgaaaccgctgaaacacttcaacagcctggaagaactcttatccctgggtggggagaggctcttgcaaaacttagtgagtgaaaataaacatgtcagaagcatgatgaacgatgtagcccccctcctgcgccccgacggcagctgttcctctctcaactaccagctgcaacccgtcatcggggtcatctacggtcccaccggctgcggcaaatcccaactgttgcgtaacttgctttccacccagctcatcaatcccccgccagaaaccgtgttctttatcgccccccaggtggacatgatacccccctcggaaattaaggcctgggaaatgcagatttgtgagggcaactacgccccaggcccagatggaactatcatcccccagtcgggcaccctcctaccccgctttgttaagatggcctatgatgagctcactctagagcaaaactatgatgtttccaacccccaaaacgtgtttgccaaagcggccgccaggggtcccattgccatcattatggatgagtgcatggaaaacctaggaggccacaagggggtctctaaattcttccacgccttcccctccaaactgcatgacaagttccccaagtgcaccggctacaccgtgctggtggtccttcataacatgaacccccgcagggacctaggtggtaacatagctaacctcaaaattcaagccaagatgcatatcatctccccccgcatgcatccctcccagcttaaccgctttgttaacacctacactaaggggctgcccttggccatcagcctgctcctaaaggacatcttccagttccacgctcagaaaccctgctacgactgggttatttacaacaccaccccggagcatgacgctctgcaatggtcctatctccacccccgggatggcctcatgcccatgtacttgaacatccaagcccatctgtaccgggtcttggaaaacatacacaaggtccttaacgaccgggacaggtggacccgagcctaccgagccaaaaaaaacaaataa

SEQ ID NO: 1406 - DNA, 408 bp, Adenovirus G52
  MISC_FEATURE (1)..(408): G52.orf00051 IX
atgagcgggacgacggacggcaacgcgtttgaggggggagtgttcagtccatatctgacatctcgtcttccttcctgggcaggagttcgtcagaatgtagtgggctccaccgtggacggacgaccggtcgcccctgcgaattccgccaccctcacctatgccaccgtgggatcatcgttggacactgccgcggcagctgccgcttctgctgccgcttctactgctcgcggcatggcggctgattttggactgtataaccaattggccactgcagctgtggcatctcggtctctggttcaagaagatgccctgaatgtggtgctgcttcggctggaggatctgtctcggcgcttggatcaactagctgcgcagatatccccatctaactccgattctacagaatcttaa

SEQ ID NO: 1407 - DNA, 1113 bp, Adenovirus G52
  MISC_FEATURE (1)..(1113): G52.orf00052 E1B 55K protein
atgaatcggcagcgtcctgagacggtgttttgggctgagttggaggatgagttcaagaagggggaattaaacctcttgtacaagtatgggtttgagcagttgaaaactcactggttggagccgtgggaggatatggaaatggctctagacacctttgctaaagtggctctgcggccggataaagtttacactattcgccgcactgttaatataaaaaagagtgtttatgttattggtcatggagctctggtgcaggtgcagaccccagaccgggtggctttcaattgcggcatgcagagtttgggccccggggtgataggtttgaatggagttacatttcaaaatgtcagatttactggtgataattttaatggctctgtgtttgtgactagcacccagctaaccctccacggtgtttacttttttaactttaacaatacatgtgtggagtcatggggtagggtgtctctgaggggctgcagttttcatggttgctggaaggcggtggtgggaagaattaaaagtgtcatgtctgtgaagaaatgcatatttgaacgctgtgtgatagctctagcagtagaggggtacggacggatcaggaataacgccgcatctgagaatggatgttttcttttgctgaaaggtacggccagcgttaagcataatatgatttgcggcagcggcctgtgcccctcgcagctcttaacttgcgcagatggaaattgtcacaccttgcgcaccgtgcacatagtgtcccactcgcgccgcacctggccaacatttgagcacaatatgctcatgcgttgtgccgttcacctaggtgctagacgcggcgtgtttatgccttaccaatgtaactttagccatactaagattttgctggaaactgattccttccctcgagtatgttttaatggggtgtttgacatgtcaatggaactttttaaagtgataagatatgatgaaaccaagtctcgttgtcgctcatgtgaatgcggagctaatcatttgaggttgtatcctgtaaccctgaacgttaccgaggagctgaggacggaccaccacatgctgtcttgcctgcgtaccgactatgaatccagcgatgaggagtga

SEQ ID NO: 1408 - DNA, 534 bp, Adenovirus G52
  MISC_FEATURE (1)..(534): G52.orf00053 E1B 19K protein
atgggaagtgagagcacagctgccttaatggatctcttggggaacttgagggaatttgacgtggttcgccgcttgctggagttggcctctgacaaaacttccaggctttggaggttttggtttggctcaacgcttagcagcgtagtttatagggtaaaaagagagcaggaggcgcagtttgctaggctgttggccgatactcctggagtttttgtggctctggatctaggccatcactctcttttccaagagaaaatcatcaaaaacttaacttttacgtctcctggtcgcacggttgcttccgctgcctttattacctatattttggatcaatggagcaacagcgacagccacctgtcgtgggagtacatgctggattacatggcgatggctctgtggagggccatgctgcggaggagggtttgcatttacttgcgggcgcagcctccgcggctggaccgagtggtggaggagaacgagccggaggagaccgagaatctgagagccggcctggaccctccagtggaagactag

SEQ ID NO: 1409 - DNA, 207 bp, Adenovirus G52
  MISC_FEATURE (1)..(207): G52.orf00054 E1A protein
gtgtctgacgcggaaggggacggagatagatcagggtctgctaattctccttgcactttgggggctgtggttccagttggcattattaaacccgtggcggtcagagtctcaggcagacggtgtgcagttgaaaaattggaagacttgctacaggaagaacagacggaacctttggacctatccatgaaacgccctaagctgacctaa

SEQ ID NO: 1410 - DNA, 360 bp, Adenovirus G52
  MISC_FEATURE (1)..(360): G52.orf00057 E1A protein
gtggaagtggatccaccgcaagatcccaacgaggacgcggtaaacagtatgttccctgaatgtctgtttgaggcggctgaggagggttctcacagcagtgaagagagcaaacggggagaggaactggacttgaaatgctacgaggaatgtctgccttctagcgattctgaaacggaacaaacagggggagacggctgtactgagccggtagtgaaaaatgaacttgtattagactgtcctgatcaacctggtcatggctgccgtgcctgtgcttttcatagaaatgccagcggaaatcctgaaactctatgtgctctgtgttacctgcgtcttaccagcgattttgtatacagtaagtag

SEQ ID NO: 1411 - DNA, 34188 bp, Adenovirus F41
catcatcaataatataccttaaagctggaaacgagccaatatgataatgagtgaggaggggctaggggtggtgcgaagtgacgtataggtaggcggggtgggaaagggtggaggtgaatgacgttggggtcgaaggttggggagtggcgcggcggaagtgacggatccggtagtatgttttgaccggaaatttggtgtattgggcgggtttttgtaactttttggttattttggcgcgaaaactgagtaatgcggaagttgaacgaactctggactttttatggctagggagggaaaactgctgatcattgctgaactttggggctttgacgtggcggtttccctacgtggcactgccacgcgaatgctcaaagtccttattttattgtgtgttcagcccttttgagggtatttaaacacagccagaacgtcaagaggccactcttgagtgccagcgagtagagttttctcctccgttgccgccgagatgagaatgctgccggacttcttcaccgggaactgggatgacatgttccaggggctgctggaggctgagcatctgtttgattttcctgaaccttctcaggcttttgaagagatttcgcttcacaatctttttgatgtggagctggatgagtctgaaggggatccgaatgaggaagcggtagatggtatgtttcctaactggatgctgtccgaggaccacagtgctgacagtggtgcggcttcgggcgattctggggttggagaagacctggtggaggttaatttggacttgaaatgctatgaagagggtttgcctcctagcggctcggaggctgatgaagctgaagaacgagcggaggaggaagagacggctgtgtcgaattatgtgaatattgctgagggtgctagtcagctggtgttggactgtccagaaaacccgggacgaggttgtcgggcttgtgattttcatcggggctctagtggaaatcctgaagctatgtgtgctttatgttacatgcgtctgaccggtcactgcatttacagtaagtagagatttttttttttgttttatactgctggatgatgtgtgggggttaacgtgcttttttgtgcttactaggtccgatttcagatgcggaaggagagtgtgagttggggtcaaatgaggagactgagctgccttgttctttgaccgccacggcaccagtaagacccaccccatgcagagtttcctgtagacgacgcccagccgttgattgcatagaagatttacttgaggaggatccgacggatgaacctttaaacttgtccttaaagcgccccaagtcctcttgagattatgtagtaataaaattattgatgtttagcctgtgttttatttcttgggtgtgtccgcgggtatataagcaggtggagtggtttcagtgttagtttattctgatggagttttggagtgagctacaaagttatcagagcctccgacgcttgctggagttggcttctgccagaacttccagctgttggaggtttatttttggttcaaccttaactaatgtaatttatagagctaaagaggactactcttcgcgatttgctgagcttttgtcttttaaccctggaatttttgcatctttaaatttgggccaccactcatttttccaggaaattgtgatcaaaaacttagatttttcttcccccggccgtacggtttctgggcttgctttcatttgttttatattggatcaatggagcgcccaaacccatctgtcggaggggtatactctggattacatgacaatggccctgtggagaaccctgctgcggaggaagagggtcttaggttgctcgccggcgcagcctccgcacggtctggatccagtgcgggaggaggaggaggaggaggaggaggaggagaacctgagggccggtctggatcctcaaacggaattgtaactgaacctgaccccgaagagggtactagcagtgggcaaaggggggagaaaaggaagttagaaaatgacggggcggattttctaaaggagttaaccttgagtttaatgtctcgttgttatcctgagtctgtctggtgggctgatttggaagatgagtttaaaaatggaaacatgaatcttttatacaagtatggatttgaacagctgaaaacacattggatggagccttgggaggactgggaactagctttgaatatgtttgccaaagtggctcttcgcccagacactatttataccattaagaaaactgttaatatacgtaaatgtgcctatgtaattggaaatggagccgtggttagattccaaacctttgaccgggtggtttttaactgtgcaatgcagagtttaggtcctggggtgattggtatgagcggggtaacatttaataatgtcagatttgcagcagatggatttaatggcaaggtgtttgcttctaccactcaattaactttgcatggtgtgttttttcaaaattgcagcggtgtttgcgtggattcctggggtagggtgtctgccagaggttgtacgtttgtgggatgttggaaagggctggtggggcaaaacaagagccaaatgtctgtaaaaaaatgtgtgtttgaacgatgcattttggctatggtggtagaaggccaggcgcgaattcgacataatgcgggttccgaaaatgtgtgctttttactgctgaagggaactgccagtgttaagcataatatgatttgtggcactggtcactctcagctgctaacttgcgcagatggaaactgtcagactctaaaagtgattcatgtggtttcccatcagcgccgcccctggcctgtttttgagcataacatgcttatgcgttgtaccatgcatttgggggctcgtcgtggcatgttttctccatatcagagtaatttttgccatactaaagttttaatggaaactgatgctttttcgcgggtgtggtggagcggggtgtttgatttgaccatagagctgtataaagtggtgagatatgatgagttaaaggctcgttgtcgcccctgtgagtgtggagccaatcacatcaggttatatccagcaactctgaacgtgacggagcagctgcgcacggaccatcagatgttgtcgtgtcttcgcaccgactacgaatccagcgatgaggattaagggtaaggggcggagcttattacaggtataaagtctgggggtggaggaaggaaaggaagttttaaaatgagcggctccatggaagggaacgctgtgagttttaagggtggggtgtttagcccatatttgacaacccgtcttcccgcttgggcaggagtacgtcagaatgtgatgggctccaacgtggacggtcgtcctgtcgcccccgccaattcagcaacccttacctatgccactgttggatcgtcggtggacaccgctgcggctgctgccgcttctgccgctgcctctactgctcgtggtatggcagctgattttggactttacaatcaactggctgcgtctcggtcgttgagggaagaagatgccctgtctgtggtgctgacccgcctggaggagctgtctcagcaattgcaagatttgtttgccaaagtggccctgcttaaccctcccgctaatgcttcttaaataaataaaagacacaactgtttgaaaagtcaagagtgtttatttgtttcttttgcggtaggccctggaccacctgtcgcggtcgttgaggactttgtggatgttttccaagacccggtacaaatgggcttggatgtttagatacatgggcataaggccgtccctggggtggaggtaggaccactggagggcgtcatgctcgggggtggtgttgtaaataatccaatcgtaacagggtttttgggcatgaaactgaaatatgtccttaaggagcaggctaatggccaggggtagtcccttggtaaaagtattaacaaatcgattaagttgggaaggatgcatgcggggggagattagatgcatttttgcctggatttttagattggcaatgttacccccgaggtcccgtctggggttcatgttgtgcaggaccaccagcacggtgtagccggtgcatttggggaatttgtcatgcaacttggaagggaaggcgtggaaaaactttgaaacccctttgtgaccccccagattttccatgcactcatccataattatggcgatgggacctttggccgcagctttagcaaaaatgttattggggtgggatacatcatagttttgctccaacgtgagctcgtcataggccattttaacaaagcggggaagaagggttcctgactgggggattatggtaccttccggaccgggggcatagttaccctcgcaaatttgcatctcccaagccttaatttcggatgggggaatcatgtccacttggggggcgatgaaaaaaacggtttcggggggaggattaataagctgggaggaaagcaggttccgcagaagctgggatttgccgcagccagtggggccataaatgaccccgatgacaggctgcaattggtagtttaaggagctgcagctgccgtcttcccgcaggagtggggtaacttcgttcatcatgcttctgacatgctggttttccctgaccaggtcttgcaagagacgttcaccacccagggaaagaagctcttccaagttgcggaaatgctttagtggttttaggccgtcggccatggtcattttttccaaagactgacgtagaagatagagccgatcccagagctcggtgatatgctctatggcatctcgatccagcaaacttcttggttgcggggattgggccggctttggctgtacggtaccagccggtgggcgtccagaggggcgagggtgatgtctttccaaggccgaagagttcgcgttagggtggtctcggtgacagtgaagggatgcgctccgggctgggcgcttgccagggttctcttcaggctcatcctgctggtgtgaaagcgcgcgtcttcgccctgagagtcagccaagtagcattttagcatcagctcatagcttagggcttcggctgcgtgtcctttggctcgaagcttgcctttggaaatgtgctgacagctgggacagtagaggcatttcagggcgtagagtttgggtgccaggaagacagattccggcgagtaagcgttggcaccgcactgtgcacacgtggtttcgcactccactaaccaggttagttcgggattttttggatcaaaaaccagactgcccccgtgttttttgatgcgtttcttacctcgggtttccatgaggcgatgaccggcttcggtgacaaagaggctgtcggtgtcgccgtataccgatttgagggtacgctgctccaacggcgtgcctcggtcctccgcgtacagaaactcggaccattctgagacaaaagcccgggtccaggccagaacaaaggaggcaatttgggaggggtagcggtcgttttccaccagggggtcaaccttttctagggtgtgaaggcaaaggtcatcttcctctgcatccataaatgtgattggtttataagtataggtcacgtgacctttggggtcttgcgtgggtgtataaagggcgtgtccgcgttcttcatcactttcttccgcatcgctgtgggcaagagccagctgttcgggtgagtacgcgcgctggaaggcgggcataacttcagcactcaaggtgtcagtttctacgaacgaggtggatttgattttaatttgtcccgcggcaatgcttttgatggtggcagggtccatctggtcagaaaacacaatttttttattatctagtttggtagcaaacgacccgtaaagggcgttggaaagcagcttggcaatggaacgcagcgtctggtttttctcgcgatcggcccgctccttggcggcgatgttgagctgcacgtactttcgtgccacgcagcgccactcgggaaagacagtggtgcgctcgtcaggaagcaaccgtacctgccacccgcggttgtgcagggtgatcagatctatgctagtggccacctcgccccttaggggctcgttggtccagcacaagcgtcctcccttgcgcgagcagtatgggggtagtacatctagtaagttttcagatggagggtcagcgtcaatggtgaagatgccaggaagtaggacgtggttgaaatagtcaatgggagtgtcaacttgcaacagagcgcgttcccagtctcgaaccgctagggcgcgttcgtagggattgagcggcgagccccacggcatgggatgggtaagcgcggaggcgtacatgccacatatgtcgtaaacataaagaggttcacggagcaccccaatgtaagtgggatagcaacgtcctccgcgaatgctggccctgacataatcatacatttcatgtgagggggctagtagtccattgcctagatccgaacgcttaggttttacgctttggtacaagatctgtctaaagatggcgtgggagttggaggaaattgtgggcctttgaaaaacgttaaatttggcttcgggcagacccacggcatcacagatgaattgggcgtaggactctcgcagcttctgtaccaaggcggcggtgacaagcacatccaaagcgcagtagtcaagggtttcgcgtatcagatcataacgagactgttgcttcttttcccaaagttcgcggttcaggaggtactcctcgcggtccttccagtaatcttcggccggaaagccacgttcgtctgcacggtaggaacccaacatgtaaaattggttgacagctttgtaaggacagcagcctttttccaccggaagagcgtacgcttgcgcggcctttctcagagaggtgtgtgtaagagcgaaggtgtcgcgcaccatgactttgaggaattggtgtttaaagtcagtgtcgtcgcaggcgccctgctcccagaggtgatagtcggtgcgctttttggatagcggatttggtagggcaaatgtaatgtcattgaaaaggattttgccggcccgtggcataaagttgcgggtgattttgaaaggtccgggcacgtccgagcggttgttaatcacctgagccgccagcacaatttcatcaaagccgttgatgttatgtcccacaatgtagagttccacaaatcggggtgttccctgtagtttgggggccttttttaactcctcgtaagtaagattatcaggagaaaatagtcccatttcaagtcgggcccattcggccacttggggattggcagcaaggaacgcttgccacagctgggtggcaaaatgggtttgcaaacggtcgcggtagtttcgaaacttttttcctaccgctattttttcgggggtgaccacgtaaaaggtatggccgtcatttccccaggcatcccattgtagttcgtgggccagacggcaggcttcctccactagggtgtcatcccccgagagatgcataactagcataaacgggaccagttgcttaccaaaggctcccatccacgtgtaggtctcaacgtcgtaggtgacgaagaggcgttcaacgcggggatgagagccgatcggaaagaaattgatctcctgccaccagccggaggactgggcgttgatatgatgaaagtagaagtttctccggcggaccgtgcattcgtgctgatatttgtaaaagcgggcgcaatactcgcagcgttgcacgttctgcacctcttgaatgaggtgtacctggtgccctcgcacgagaaatcggagagggaaattaagaggctcctgagcgctctgcctttctccctcgttgttctcttctgcacctgcacgctcctgctgtgggaggatgacggagggagtgacgatgccccgcgaggcgcaggtccaaacctcgacgcggggaggctgaagcctgagagcgagagagcggatttgggagctgtccagggagtccaggaaggcttcgctgaggccggcgggcaaagaacgaaggttaacttgcagaaggcgggtaagggcggacgccaggcgttgatgaaacttaatttcaaggggggagttggtggaagtgtcaatagcgtagaggagaccttgtcctcgggaggctacaatggttcctcggaggcggaaggttgagggagggtttacatcatttgacgcggacgggcgcctgggggcagtggcggttcgggacccgcctgaagaggaggtagaagcacgttggcctggagctcgggtagcggttgatgctgagcccgcagctgactggcgtgcgcgacaacgcggcggttgagttcctggatacgtctttgttgagtgaagaccaagggtccccggactcggaacctgaaagaaagttcaacagaatcaatctccgcatcgttgaccgcgacctgacgcagaatttcctgcacgtcgcccgagttgtcttggtatgcgatctcggacataaactgatcgatctcttcctcctggagctccccccaaccggcccgctccacggtggccgcaagatcgttggagatgcgacccatgagctgggagaaggcgttaagcccgttttcgttccacacacggctgtagacaacgtcaccagtgtcgtcccgggcgcgcattaccacctgggccacgttaagctcaacgtgacgggcaaacacggcgtagttgcgcaagcgctggaaaaggtagttgagggtggtggcaatgtgctcacagacaaagaagtacataacccaacgccgaagagtcatttcgttgatattgccaagggcttccaagcgttccatggcttcgtaaaagtctaccgcaaagttgaagaattgggagttgcgggccgcgactgtcagctcgtcttgcaagaggcggattagctccgccacagtttctcgcacttcgcgttcaaaggcgcccggcgcttcctcgatttcttcttccatgagttcttcctcctctgcaacaggcacctcgggactcgcgggtgccggaacaggtcgtcggcggcgacgcctaatgggcagccgatcgacaaagcgttcgatgatttctccgcggcgacgacgcatggtttcagtgacggcgtgtccgttctctcggggtcgcagctcgaatacaccgccttgcaatcccgttccggagatgggtggtagcaggtggggtccttcgggcagagacagggcgctaactatgcatttgattatctgttgtgtaggcagagattgccaagcgttgttgagcaagtccaattggacgggatcagaaaacttttcaaggaaagcatcgagccaatcacagtcgcaaggtaagctcagaacggtgggctgtgggtttccacgggaggtgatgctgctgatgagatagttgaagtaggcggttttcaaacggcggatggtggcaaggaggataacgtcttttggtccggcctgttggatccgcaggcggtcggccatgccccaggcttcgctctgacatcgacgtagatccttgtagaagtcttgcatgagtctttccacgggaatttctatatctcctcggtcggccatgcgggtagagccgaacccgcggagaggctccaggagggccaggtcggcgaccactctttctgccagcacggcttgctgaatttgagtaagggtgttttggaagtcatctaagtccacaaagcggtgataagagccggtgttaatggtgtacgtgcagttggccatgacggaccagtttacaacttgcattccgggctgggtgatctctgtgtacctaaggcgggagtaggctcgggactcaaagacgtagtcgttgcaggttcgcaccaagtactggtagccaaccaggaagtgaggcggcggttcgcggtagaggggccatcgtagggttgctggggcgcccggcgcaaggtcctccagcataagacgatggtaatggtaaacatagcgagagagccaggtaattccggctgaggtggtcgcagcgcgggtgaactcgcggactcggttccagatgttgcgcaacggtgagaaacgctccatggtgggcacgctttggccggtaagacgggcgcaatcttgtacgctctagatggaaaaatagagagcaatcacggactcttctccgtagcctggaggatagaccgccagggtgcggtggcgaacaacccccggttcgagaccggctggatccgccactcccgacgcgccggccccgtgtccacgacggaaaccccgccgagacctagccgcggtccccggatctccagatacggaggggagtctttttgtcgttttttgtagatgcatccggtgttgcgacagatgcgtccgacgcagccaacgctcccgccccccactagcgcccaggccgccgtggctctttccggagccggcggtggcgaccctgacgaggaggccatgctggatttggaagagggcgagggtttggctcgcctgggagcaccctcccccgagcatcatccccgcgtacaacttaaaagggacgcacgtcaggcctacgtgccgccgcagaacctgtttagggatcgcagcggacaggaacccgaagagatgagggaccgcaggtttcatgcgggaaaggaactgcgggccggtttcaacagccaaagggtgctgcgcgccgaagactttgagcccgacaagcgtagtggagtaagtccggcacgggctcacgtgtcggcggccgatctggtgactgcgtacgagcaaactgtaaacgaggagcgcaactttcaaaaaacctttaacaatcacgtgcgcaccttagtagcgcgagaagaggtggccataggcctgatgcatttgtgggactttatggaagcgtacgtgcagaatccggcaagcaaaccgctgacggcacagctgtttttgattgtacaacacagccgcgataatgaaacttttcgagaagctatgcttaacattgctgagcccgaggggcgctggcttttagacctagtcaacatcctgcagagcatagtggtgcaagagcgcagcttgagcctggccgacaaggtggcggccattaattacagcatgctcagtctcggcaagttttacgcccgcaagatctacaaaactccttacgtgcccatagacaaggaggtgaaaattgatagtttttacatgcgtatggcgctgaaggtgttgacgctgagcgacgatctgggggtttaccgcaacgaccgcattcataaggccgtgagtgccagccgccgccgcgaactgagcgaccgcgagttgatgcacagcctgcgtcgagcattgacgggggccggcggggatgccaatgccgagtcttactttgacatgggggcagatttgcaatggcagccaagtgcccgggctctagaggcggttggataccgcaacgcaatgcaggaggaggatgaggaggaggactacgaggacgagccctgatcggccaggtggtgtttttgtagatgcagcggtcgacggcggtggtggacgggtcgcagcaggtggatcctgccatgttggcagcactgcaaagccaaccctcgggcgtgaccccctcagacgactgggcggcggccatggaccgtattctagctttgaccacccgcaatcctgaagccttcaggcagcagccccaggccaacaggttttcggccattttggaagccgtggtaccctctcgtactaacccaacccacgagaaggtgctggctatcgtgaacgccctaacagaaagcaaagcaattcgcaaggacgaagcgggactgatttacaatgctctgctggaaagggtggcccgatacaacagtaccaacgtacaagccaatcttgaccgccttaccactgacgtgagggaggcggtagcacagcgggagcgctttatgcatgacactaacttgggttcccaggtggcgctaaatgcttttctgagcacgctcccggctaacgttccgcgcggacaggaggattacgttagctttatcagcgcattgcgcctcctggtggcagaagtacctcaaagcgaggtttaccagtcaggtcccgattactttttccaaacttcgcggcagggactgcagacggttaacttgacacaggccttcaaaaacttgcagggcatgtggggtgtgcgggcccccgttggtgaccgcgccaccatttccagtttgctgacgcccaatacccggctgttgttgctgctgattgccccatttacaaatagtagtaccatcagccgggactcataccttggccatctgatcactttgtaccgcgaggctatcggtcagacacaggtagacgaacaaaccttccaggaaatcaccagtgtgagccgtgcgttaggacagcaagacaccgggagtctggaagccactttgaacttcctgctcaccaaccggcaacagaaaattccctcgcaattcacactgagtaccgaggaggagcgtatcttgcgttacgtgcaacagtctgtcagtttatacttaatgcgcgaggggatgaccccatcctcggctctggatatgacggcccgcaacatggaaccgtcgctgtattcgtccaatcggcctttcattaaccgcctaatggactacctgcatcgcgcggcagccatgaacagcgagtactttactaatgccattttgaacccccattggatgcccccctctggtttttatacgggagaatttgacatgcccgagggagatgacggcttcttgtgggacgacgtgtccgacagcatttttgtccctgcgcgttaccgcaagaaggaaggcggtgatgagctgcctttgcccttggtggaagcggcttccaggggccagagccctttcccaagcctcccatcgcttgttagcagcagcaacagcggacgggtgttgcgtccccggcttccaggggagacggactacctaaacgatcccctgttgcaacccgttcgtaataagaactttcctaacaacggggtggaaagtttggtagataaaatgaatcgctggaagacctacgctcaggagcagcgggagtgggaggagagccagtcccgccctttggccggccctttcagccgttggcgccggcgagaagacgaccaggatgactccgccgatgacaatagcgttttggacttggggggaactggtgcttcttccaaccccttcgcccacctacgtcctcagggccgcttgggcagattgtattaaaaaaaaaaaaaaaaaaaaaaaccacttaccagagccatggcaacagcgtcggtccctttgtgtgtttttcccctcttcccagtagcaaaatgagacgagcggtgggagtgccacccgtgatggcatacgcagagggtcctcctccttcttacgaaagcgtgatgggatcagcggattcgccggcaacgctggaggcgctctacgttcctccccgctacctggggcctacggaagggcgaaacagcattcgttactcagagttggcgccgctatatgacaccacccgggtttatctagtggataacaaatcggcagacattgcctccttgaactaccaaaatgaccacagcaactttcaaaccacggtggtgcagaacaatgacttcacaccagcggaggcggggacgcaaaccattaactttgacgagcgctcgcggtggggtgctgacctaaaaacaatcctgcgcacaaacatgcccaacataaacgagtttatgtctaccaacaagtttaaagctcggctaatggtagaaaaaaaaaataaggagactggtttaccgcgctacgagtggtttgagtttaccttgcccgaaggaaactactcggaaactatgaccattgatcttatgaataacgccattgtagacaactacttggaagtgggaagacaaaacggcgtgctagaaagcgacataggggtgaagtttgacacgcgcaatttccgtttgggttgggacccggtaaccaagcttgtcatgccaggcgtgtacaccaatgaagcgtttcatccggatattgttctattgccggggtgcggagtggattttacgcagagtcgtcttagtaatctgctgggaatccgtaagcggctgccgtttcaagaaggttttcaaatcatgtatgaggatttggagggaggtaacattccggccttgttagacgttgcaaagtatgaagctagcattcagaaagccaaagaggagggaaaagaaattggcgacgatacttttgcaacccgcccccaagatctggtaatcgaaccagtggcaaaagatagcaaaaatcgcagctacaatttgctgcctaatgatcaaaacaacaccgcatatcgcagctggtttttagcctacaactatggagaccccaagaagggagtgcaatcctggactttattgaccacagcggacgtcacgtgcgggtcgcagcaggtgtactggtctttacccgacatgatgcaagacccagtaacttttcgcccgtctacgcaagtcagcaactacccagtagtgggggttgaattgctgccagtacacgccaaaagtttctacaatgagcaggccgtttactctcagcttatccgccagtccaccgcgcttacacacgtcttcaatcgctttcctgagaatcagatactggtgcgtccgcccgctccgaccattaccaccgtcagtgaaaacgttcccgccctcacagatcacggaaccctgccgctgcgcagcagtatcagtggagtccagcgcgtgaccatcactgacgcccgccgtcggacctgtccctacgtgcacaaagccctgggcatagttgctccaaaagtgctttctagccgcaccttttaacatgtctattctaatctcgcccgataataataccggctgggggttgcactctgccggcatgtatggcggtgccaaaaggcgttccagccagcatcctgttcgtgtgcgagggcattaccgcgctccctggggggcccacacccggggcataatttccgcccgcaccaccgttgatgacgtgattgactctgtagtagccgacgctagacggtatcagcgacccacgtccacggtggattccgtgattgacagcgtggtagcagatgccaggcgctatgcgcagcgcaaaagccgtttgcggcgtcgccggcgacgacccacgactgccatgattgccgctcgagcggtgttaaggcgtgcgcgtcggataggacggcgagccatgcgccgagccgctgccgctgccagtgctggtcgagcccgccgtcaggccgctcgccaggctgccgcggccattgccagcatggcccagccccggcgagggaatgtctactgggtaagggacgcatcgggtgtgcgggtgccggtgcgaactcgaccccctcgaagttagaagacgattcaaaacgatggacgaagactgagtttccctatcgttgccagcatgagcaagcgcaagttcaaagaagagctgctggaggcccttgtgcccgaaatctatggccctgcggcggacgtcaagcccgacattaagccccgtgccctgaagcgtgttaaaaagcgggaaaaaaaagaggaaactgggttgttagatgatggtgtggagttcgttaggacctttgctcctcggcgacaggtgcagtggcgtggacgcaaagtgaagcgcgtgctccgacctggcaccactgtggtgttcactcctggcgagcggtctgccacacgggcattaaagcgggaatacgatgaggtttatgccgacgaagatattctggagcaggcagcccagcaaattggcgagttcgcctacggcaaacgcggtcgttacggagaggtggggctgttgctggatcaaagtaacccgactccaagcctgaagcccgcaacgcagcagcagattcttccagtaacggaaaccaaacggggcgtcaaaagggaaaacaaagacgaattgcagcctacaatgcaactcatggtgcccaagcggcagaagctggaggaagtgctggaaaatatgaaagtggacccaagcgttgagccggaagtaaaagtgcgccccattaaggaaataggtccaggtctgggagtgcaaacggtggatattcagatccccgtacgtaccactccagcagtggcaatggcagaagccatggaaacgcagacagatcagcctgcgcctgtgactacccgggaaataggtttgcaaacggacccaaggtacgagtctgttacttccacccgccgctcgcgcgtaagaaagtatacagccgccaactctatcctaccggagtatgccttacatccgtcaattacgccgacgcctggctatcgcggtacaatcttcagacccagccgccctcgaaccacccgccgtcgtcgcactacccggcgtcgatcgcgtcgcattacacccatctccgtgcaccgtgtaacccgccggggccgcacaattaccctgcccaatgcgcgttaccaccccagcattctcatttaattcgtccgctgccgtttttccagatggctctgacttgccggtttcgcatcccagtttcgtcctaccgaggaagatctcgccgtaggagaggcatgttgggcagcgggcgccgacgcgctttgcgcaggcgtatgaaaggcggatttttgcccgcgctgattcccattatcgccgccgccattggcgcaatcccaggcattgcctctgtggcgttgcaagcacgcaaacaataaaagaagcttgacactgactccctggtcctgactattttatacagacaagacatggaagacatcaattttgcgtcgctggcgccgcgtcacggctcgcggccgttcatgggcacctggaacgagatcgggaccagccagctcaacgggggcgctttcagttggagtagcctgtggagtggcattaaaaactttgggtcctccattaagtcctttggcaacaaggcctggaacagtaacactggtcagatgctgcgagataagttgaaggaccagaacttccaacaaaaagtggtggacggtctggcctcgggtataaatggcgtggtggatattgctaaccaggccttacaaaaccaaatcaatcagaggctggagaatagccgccaacctccagtagctctgaagcagcgaccaactcccgaaccagaagaggtggaagtggaagaaaaattacccccgttggaaacggcacctcccttgcctagcaagggtgagaaacggccgcgtcccgagctggaggaaaccctggttgtggaatcccgcgagcccccctcgtacgagcaggctttgaaagaaggagcttcgtatcccatgaccagacccattggctccatggccagaccggtttatgggaaagaaaaaactcccgtaacgttagaattgccaccacccgcgcccaccgtaccgcctatgccggctcccaccctgggtaccaacgttccccgccttgcggccccaaccgttgctgtggccactccggctcgcagagttcgcggtgccaattggcagagcactttgaacagcattgtgggtttgggagtgaaaagcctaaaacgccgccggtgctattaaagtggaaccaagctaaatacccttgttgtatgcgcctcctgtgttacgccagacagccgagtgacgggtcaccgccaagagcgccgcttgcaagatggccaccccctcgatgatgccgcaatggtcttacatgcacatcgccgggcaggacgcctcggagtatctgagtccgggcctggtgcagtttgcccgcgccaccgatacgtacttcagcctggggaacaagttcagaaaccccactgtggctccgacccacgatgtaaccacagacaggtcacagcgactgacgctgcgattcgtgccagtcgaccgcgaggacaccgcttattcttacaaagtgcgctttacgctggccgtgggcgacaaccgggtgttggacatggccagcacctactttgacatccgcggcgtgctggatcgtggccccagctttaaaccctactccggaaccgcctataactccctggctcctaaaacagcacccaatccatgcgaatggaaggacaacaacaaaataaaagttagaggacaagcaccccttataggaacaaacatagacaaagacaatgggattcagataggaacagacgcaacgacgaagcctatttatgccgacaaaacatatcaaccagagcctcaagtgggccaaacacagtggaacagtgaagttggtgccactgacaaggtagcgggtagggtattgaaagataccacgccaatgttaccatgctacgggtcttacgccaaaccaacaaatgaaaagggtggtcaggccaatcttataacaaacggaaccgatcaaactctaacaagcgacgttaacttacagttctttgccttggcaaacactcctaatgtgccaaaagccgttctttacgctgagaatgtggctattgaagcgcccgacacccatttggtgtacaagccagatgtagctcagggaaccgtaagttcggcagatcttttaacgcaacaggcagcgcccaacagaccaaactacattggctttagggataacttcattggcctgatgtactacaactccacaggcaatatgggcgtattggctgggcaggcttcacagctaaatgctgtagtggacttgcaagacaggaacactgagttatcgtaccaacttatgctggatgctcttggcgatcggagcagatatttttccatgtggaatcaggctgttgacagttacgaccccgacgtaagaatcattgagaaccacggagtggaggacgaattgccaaattactgctttccgctgggagggtctgcagctacagacacgtattctggcataaaagcaaacagcggaaactggactgcggacgacacttatgccgacagaggggcagaaattgagtctgggaatatttttgccatggaaatcaatttggcggccaatctctggcgcagcttcttatattccaatgtagccctgtatttgcctgactcatacaaaattacgccagacaacattacactacccgaaaacaagaacacctatgcctacatgaacggtcgggtggcggttcctagcgcccttgatacctacgtaaacatcggggcacggtggtctccagatcccatggacaatgttaaccccttcaatcaccaccgtaacgccggtctgcgctatcggtccatgctcttgggcaacgggcgttacgtacccttccacattcaagtcccccagaagttttttgccattaaaaatctcctcctgttacctggttcctacacctacgagtggaacttcaggaaggacgttaacatgatcctccagagcagtctgggtaacgacctgcgggtcgacggagccagcgtcaggttcgatagcattaatctgtacgccaacttttttcccatggctcacaacaccgcctccaccttggaagctatgctgcgcaatgacaccaacgaccaatcgtttaacgactacctttgcgctgcaaacatgctttatcccattccttctaatgctactagcgttcccatttctattccttcgcggaactgggccgcttttcggggctggagttttactcgactgaaaaccaaagaaaccccctctttgggttcgggatttgatccctactttacctactctggctccgttccatacttggatggtaccttttacctcaaccacacttttaaaaaggtgtccatcatgttcgactcctctgtgagctggcctggcaatgaccgactgcttacccccaatgagtttgaaatcaaacgcaccgtggatggggaagggtacaacgtggctcaatgtaacatgaccaaagactggtttctgattcagatgcttagtcactacaacattggatatcagggtttttatgtacccgaaagctacaaagatagaatgtattcctttttccgaaacttccagccaatgagtcgtcaggtggtaaacactaccacctacaaggaatatcagaatgttacccttcctttccagcataataactcaggctttgtgggatacatgggacccaccatgcgggagggacaagcttaccccgctaactacccttacccccttattggccaaacggccgtgccaagcctgacacagaaaaaattcctgtgcgatcgcaccatgtggcgcattccgttttccagcaacttcatgtctatgggggcactgaccgacctggggcagaacatgctgtatgccaattccgcccacgccctcgacatgacttttgaggtcgatcccatggatgagcccacacttctttatgttttgtttgaagttttcgacgtcgtgcgcatccaccagccccaccgcggcgtcatcgaggccgtctacctccgtacgccgttctcggccggtaacgccaccacataagaagctggccaatgggctccagcgagcaggagctggccgccatcgtgcgtgacctgggttgcggaccctactttctaggcacctttgacaaacgtttcccgggctttatggctccgaacaagctggcctgcgctattgtgaacacggccgggcgtgaaacagggggcgttcactggttggccctggcctggaaccccaagagccatacctgttacctctttgacccgtttggcttttcggacgagcggctcaaacaaatttaccagtttgaatatgagggcctactaaagcgaagcgctttggcttccacgcctgaccactgcattacccttgtgaaatctacccagaccgttcagggacctttttctgccgcctgtggtcttttctgctgcatgtttttgcatgcttttatacactggcccagtaatccaatggagcaaaatcccacaatggatcttctcacgggcgtacctaacagcatgcttcaaagcccccaggtcgaacccaccctgcgtcggaatcaggaacgattgtatcgttttttgacccaacactctccctactttcgtcgtcaccgcgagcgaattgaaaaagctacagcttttgatcaaatgaaaaatgctcaagtgttgtttcataataaaattttttattgatttcacgctggcagactttttttttttatttaaaagggctcaatctccgcatcgccgtgaccggtgggaagggccacgttgcgatattgcaaacgggtgctccacttgaattcgggaataatcaacttgggcaaagggtcttcgacgttttccttccaaaattgtcgtaccagctgcagggcgcttataacgtcaggcgcagaaattttaaaatcacaattggggccagcgctaccgcgcgaattgcggtatacgggattagcacactggaacactagcacacaggggtggagtatgctggcaagagccgacttgtcggtaacttcgttggtcttcagatcttccgcgccgctcaaagcaaatggggttaccttacacatctgccgacccaattggggtacaagatccttcttgttaagacactcacagcgcaaagggattaatatgcgttgctgaccgcgttgcatctgcgggtattcggcttgcagaaacgcttgcatttgtttaaatgctatttgggctttaagcccctccgaaaaaaacagcccgcaggacttgctagaaaacatgttgttgccacagctcacatcttccgcgcagcaccgcgcgtcgtcattcttgatttggaccacgctgcgaccccagcggttctgaacaactttggttttgctaggttgctccttgagggcgcgctggccattctcgctgccaacatctacctccacaacttgctccttctgtatcatttctcgcccgtggaagcatctcaacacgccttcctcccgggtacagccatgagcccaaacagcgcagccggttgtatcccagttgtggtgcttcaccccagcgtaggtttccacgtaggcagccaggaatcgacccatgagctctgtaaaggttttctgggtggtgaatgtcaaagacaatccgcggcgttcctcattcaaccaggtctgacatatcttgcgataaacggcgttttgttcaggaagaaacttaaaagctgttttttcgtcattctccacgtgatatttctccatcaggacgttcatgagctccatgcccttctcccaagccgaaaccaatgggtcaacctgggggtttgttatcagcatggtcactgccttggaagagccggattgattattttcttcctcttctggtggcgttagatccctggggataacggttttctccaaacgcctaatttgtcgcttgccattgcccttttgtactacttctacgcctggatagctgaacccgtggtacagcacctcttcgtcctcctcgctgtccggaaccacttcgggcgacaaggtcggagcgtgtacttgctccggtacttgcaagtttttgcgcagctttttcttgggaggcaatgacggagggcgctccgggctcgtctcctggaggtagggagtaacggtggggtgctctcgctgacggccagccatgctttactcctaggcgaaaaaaagatggaggaggatcttatacagccgcagccagactccgaaaccttaaccagccccacctctgaggtcggcgccgtcgaactagtggaacatgaggatgatgagcgagtggagcaagacccgggctatgtgacgccgcccaaggacggcaaggaatcggtgccggtgtcgccgctcaccgaagcagactacctgggaggggaggacgacgtgcttctaaaacatgtgttgcggcagagcaccattgtgcaggaggccttcaaggattactctgggtttccgctgacggtggaggagttgagtcggacctacgaagctaatctcttttcaccgcgtgtgcccccaaaaaagcaagccaatggaacctgcgagcccaatccgcgcctcaacttttatccagtttttgcagtccccgaagcgttggctacctatcatattttttttaagaaccaacgcatccccctatcatgtcgtgccaaccgcacccaaggagaccgcattttgcatctcaaagccggcgctcacatacctgagattgtttccttggaggaagttcccaagatatttgaaggtcttggcaaagatgaaaaacgggcagcaaacgctctgcaaaaaagtgaaaccgaaaatcagaacgttctggtggaactggatggcgataacgcgcgtctcgccgtgctcaaacgcaccatcgaagtttcccactttgcctaccctgctcttaaccttccccccaaagttatgcgttcagtcatggatcatctccttatcaagcgggtcgaacctttagattcagatcagcccgaacaaaactccgaggacggccagcccgtggtttctgacgacgatctcgcacgctggcttgacacccatgaccccaccactttgcaagaacggcgcaaaatgatgatggcggtcattctgattaccgttgagctcgagtgcttgcaacgcttctttgccaatccccagacgctgcgcaagattgaggaatccctccattatgctttccgtcatggctacgttcgacaagcgtgtaaaatttctaatgtagagcttagcaacttagtttcctacatgggaattttacacgaaaaccgcctggggcaaaacgttctccattgcactttgcaaggtgaggcccgccgcgactacgttcgcgactgcatttatcttttcctaatcctaacctggcaaaccgcaatgggtgtctggcaacaatgtctagaggagcgtaacctccgcgagcttgaaaaactgctggttcgaaatcgccgcgagctttggacagcttttagcgaacgcacggccgcttgccagctggccgatctgatttttcccgaacgactcatgcaaacgctgcaaaacggcttgccagactttgttagtcagagcattttgcaaaactttcgctcttttatcctcgagcgatccggtatcttaccggctatgagctgcgccctaccctccgatttcgttccactttgctaccgcgaatgcccgccgcctctctggagtcattgctatctcctccgcctggcaaactacctagcccaccactccgacctcatggaaaattccagcggcgaaggattgctagaatgccactgccgctgcaacctctgcacaccccaccgctctctggtctgcaataccgagctgctcaacgaaacccaagtaatcggtacctttgaaatccaaggaccagagcagcaagagggtgcttccaatcttaagcttactccggcgctctggacttcagcctatttgcgcaaatttattccagaggactatcacgcccaccaaattaagttctacgaagaccaatcccgacctcccaaagcccccctcacggcttgtgtcatcacccagagccaaattttggcccaattgcaagccatccagcaggcgcgacaggagtttctgctaaaaaaaggtcacggggtttacttggatccccagaccggtgaggaactgaataccccgtcaccctccgccgccgcttcgtgccgcccgcagaaacatgccgcccaaagggaacaagcaagccattgcggatcggcggtcccaaaagcaacagaaactgcaagagcagtgggacgaggaggaggaatcctgggacgacagccaggcagaggaagtttcagacgaggaggaaatggagagctgggaaagtctagacgaggagctggaggacaaaccccccaaggacgaggaggaagaaatcatcgccagcgctgcggcgccgtcttccaaagaacccgctcggagccagcctccgacggggaaagtcggaccgtccccgccgcggccaggcttgttgaaagccagccgtagatgggacaccgtttccatcgcaggatctccaccagccccagttggtaagcagcccccgcaaactcggcgggggtattgttcctggcggccctacaaaagcaatatcgtcgcctgcctccagcactgccggggcaacatctcctttgcgcgacgatacttgctattccatgacggggtggcggtccctcgcaacgttctctactattaccgtcatctctacagcccctacgaaacgctcggagaaaacaactcggccgcgtaaggaaaagacttccgccattgctactcgccaggatacaccagtcgcgcaggaactaagaaaacgcatctttcccacgctgtatgctattttccagcagagtcgcggccagcagttggaactgaaagtaaaaaaccgctccctgcgttcgctcacccgcagctgcttgtatcacagaagggaagaccaactgcagcgcacgctggaagacgccgaggcactgttcaataaatactactcggtgtcttttaaggactgaaaagcccgcgcttttttaagaaccagattacgtcatcaccatgagtaaggaaattcccacgccttacatgtggagctatcagccacagatgggcttggcagctggagcatctcaggactactctagtcgcatgaactggctaagtgccggcccccatatgattgggcgcgtaaatggaattcgcgccactcgaaaccaaattttgctggagcaagctgccctgacctccaccccgcgaagtcaattgaacccgcccaattggcccgctgcccaggtgtatcaggaaaaccccgctccgaccacagttctcctgccacgcgacgctgaggccgaagtccagatgactaactccggagcgcaattagcgggcggatccagacacgtcaggttcagaggtcggtcctcgccctactctccaggtcctataaagaggctgattatccgaggccggggtatccagctcaacgacgaagtggtgagctccttagccggcctccgacctgacggagttttccagcttggaggtgccggccgctcctccttcactcctcgccaggcgtacctgacactccagagctcttcttcccagcctcgctccggcggcattggaaccctccagtttgtggaggagtttgtaccctccgtttacttcaacccattctcgggcgctcctggtctttacccagacgacttcatcccaaactacgacgcggtgagcgaatctgtggacggctacgactgaatcccaatggtgcgtccgtgactgtgtggctgcaacatctacatcggcgccttaatccttgctactttgtctgaaaagtctgtgatttttatttaccgccccagcgcttggattacatgaagatctgtgttcttttttgtgtgctaagtttaacaagtagcctaaagacttcacctacagccgttggttctttacgtcagctgcaagattccaacaaaggtacacaccaaactctttatttttctgagtctaccacttctattgcacttaactgttcttgtcgtaaccaactcgttcagtggcgcgctaacagacaattttgcaaactattttgggacgctcttattgttcaaggaaacaacagcctttgtaacaactgtactgctactactttaactcttacacctccttttgttcccggtccatacttgtgcattggcacaggaagagggcctagctgctttaatcgctggactttacaaaaagagaacctaaccactaccaccctccttccccttactacttatactttttcccaaaaaaaaatttactttttgcccattattgcacttttggcctttgtctgtgttattaccgctaattacattttaattttcaatcttgataatttttactaatcatgctgctgtttttactttgccttcttttctgctctgcctatgccgccgtgccagaaaaaactcttaacaacctcgttcgggtgtacgccttagttggtaccaatctatcccttgattctatgaaaactcctcagattgacgaacttactagtcttagctggattaaacaggaagacaatcctaacaaaaacttacaatcatttttttttattggtcaaaaactctgtgaagttaccaaagacaaaatcactgtttttaactattatccgttggaattttcctgcgctaacgtaaccttgtatttgtataatcttaaaactgacgattctggcctctataatggaaaggcccataccaaagagcttgaacataacacctatgttaggctttatgttattgacattcctccgcctaagtgtgacattacttcacgttacttaggcatacaggctactggggaagattattgtttaattgaaatcaattgcactaactccaaatacccagctgtggttaaatttaatggcaggcaaagcaacttctaccattatgttagcgaaaacggaaacaaagaacttccaaatttttatgaaacacacatcactattaatggtacccacaaaagctttcactttaattacccttttaacgacctttgtcaaacaaccagcgctctacaatataatgacaatgtccaggtagtcctcattcttctcatagtagttggcttaataataatttccgctagtttaatattgctttattgccaccgcaaaaaaatcaaggccgaagttcaacatcaaccagtgcatatttgtttagaaaaataaaatttttttcttttcagtatggtaactcctcttctcctgcttgtctgtctgccaattatctacgcctccaccaccttcgccgcagtctcccaccttgatacggattgtcttcccgccttgctgacttatctcatcttcacctctgtttgctgcactgccatctgcagcattgccactttttttgtggccattttccaaactgcggactacctatacgttagagtggcatactatcgtcatcatccccaatataggaaccacgaggtggccgcccttctgtgcctgtcatgaaagttcctcttctctgtcttatcctcctttacaaagtcctggccaactgccacctccaccggcccaccgagttcctgcgctgctactcaacagaaacctcttccttttggctgtactccattatttttattttgattttctttgccacctttttgggattacaaatttacggctgccttcacctgggctggatgcatcctcccaacaacctacccagatttcctggtttcttattacagcccccgccgcccccaccagctcctgtacagcgcgctccatcagttattagctactttcatcttaactctgaagatgtctgaccaactagaaatcgacgggcagcgcactgagcagctgatccttgctcggcgaaaactcaaacaacaaaaccaggaattgttcaaccttcaagccttacaccaatgcaaaaagggtcttttctgcctggttaaacaagctgaactttgctatgatgtaacccaacaggggcatgagctatcatacactttaaacaagcaaagacagagctttatgactatggtgggggttaagcccattaaggttactcagcaatccggcccagttgagggaagcattctttgtcagtgcaccaattctgaatgcatgtacactatggtaaaaaccctgtgtggtctcagggaacttctcccctttaattaaagttatctgattaataaagcttaccttaaatttgatatcagttgtttgtcaagtttttccagcagcaccacctgcccttcctcccaactttcgtaggggatgtgccaacgggcagcaaactttctccacgtcctaaagggtatatcggtgttcacctttttaccctgacccacgatcttcatcttgcagatgaaaagaaccagaattgaagacgacttcaaccccgtctacccctatgacaccttctcaactcccagcatcccctatgtagctccgcccttcgtttcttctgacgggttacaggaaaaacccccaggagttttagcactcaagtacactgaccccattactaccaatgctaagcatgagcttactttaaaacttggaagcaacataactttagaaaatgggttactttcggccacagttcccactgtttctcctccccttacaaacagtaacaactccctgggtttagccacatccgctcccatagctgtatcagctaactctctcacattggccaccgccgcaccactgacagtaagcaacaaccagcttagtattaacgcgggcagaggcttagttataactaacaatgccgtagcggttaatcctaccggagcgttaggcttcaataacacaggagctttacaattaaatgctgcaggaggaatgagagtggacggtgccaacttaattcttcatgtagcatatccctttgaagcagtcaaccaactaacactgcgattagaaaacgggttagaagtaaccagcggaggaaagcttaacgttaagttgggatcaggcctccaatttgacagtaacggacgcattgctattagtaatagcaaccgaactcgaagtgtaccatccctcactaccatttggtctatctcgcctacgcctaactgctccatttatgaaacccaagatgcaaacctatttctttgtctaactaaaaacggagctcacgtattaggtactataacaatcaaaggtcttaaaggagcactgcgggaaatgcacgataacgctctatctctaaaacttccctttgacaatcagggaaatttacttaactgtgccttggaatcatccacctggcgttaccaggaaaccgacgcagtggcctctaatgccttaacatttatgcccaacagtacagtgtatccacgaaacaaaaccgctgacccaggcaacatgctcatccaaatctcgcctaacatcaccttcagtgtcgtctacaacgagataaacagtgggtatgcttttacttttaaatggtcagccgaaccgggaaaaccttttcacccacccaccgctgtattttgctacataactgaacaataaaatcattgcaggcacaatcttcgcatttctttttttccagatgaaacgagccagacttgaagatgacttcaaccccgtctacccttacgaacactacaatccccttgacatcccatttattacacccccgtttgcctcctccaacggcttgcaagaaaaacctccgggagtcctcagcctgaaatacactgatccacttacaaccaaaaacggggctttaaccttaaaactgggcacgggactaaacattgatgaaaatggagatctttcttcagatgctagcgtggaagttagcgcccctattactaaaaccaacaaaatcgtaggtttaaattacactaaacctctcgccctgcgaagtaacgcgctcactctttcttacaacgctcccttaaacgtagtaaataacaatttagctctaaatatctcacaacctgtcactgttaatgcaaacaacgaactttctctcttaatagacgccccacttaatgctgacacgggcactcttcgccttcaaagtgctgcacctcttggactagtggacaaaacactaaaagttttgttttctagccccctctatctagataacaactttcttacactagccattgaacgcccgctagctctatccagtaacagagcagtgacccttaagtattcaccacctttaaaaatagaaaacgaaaacttaaccctaagcacaggcggaccttttactgtaagcgggggaaatctaaacttaacaacatcggcacccctctccgtgcaaaacaactctctctccttattcattacttctcctttaaaagttattaattctatgttagctgttggggttaacccgccttttaccatcactgactctggattagctatggacttaggagacggtcttgcactaggtggctctaagttaataatcaatcttggtccaggtttacaaatgtctaatggagccattactttagcactagatgcagcgctgcctttgcaatatagagacaaccaacttcaactcagaattggctcaacgtctggcttaattatgagcggagtaacacaaacattaaacgtcaatgccaataccggcaaaggtcttgctgttgaaaacaactcactagttgttaagcttgggaacggtcttcgctttgatagctggggaagcataactgtttcgcctactaccactacccctaccaccctatggaccaccgcagacccgtctcctaacgccactttttatgaatcactagacgccaaagtgtggctagttttagtaaaatgcaacggcatggttaacgggaccatatccattaaagctcagaaaggcattttacttagacctacagctagttttatttcctttgtcatgtatttctacagcgacggaacatggagaaaaaactatcccgtgtttgacaacgaagggatactagcaaacagtgccacgtggggttatcgacaaggacagtctgccaacactaacgtttctaatgctgtagaatttatgcctagctctaaaagatatcccaatcaaaaaggttctgaagttcagaacatggctcttacctacacttttttgcaaggtgatcctaacatggccatatcctttcagagtatttataatcatgcattagaaggctactcattaaaatttacctggcgcgttcgaaataatgaacgttttgacatcccctgctgctcattttcttatgtaacagaacaataaaatattgttgtttttgtttttataactttattgatacttttacagaattctaaccgttaatccccctccccccttccactttatcttatacacctccctctccccctgtaccgccgcaaacaactgcaatttagaatttacacaacaattcttctgtgacaaaattaacacaggttctttgctggcaaagcgctgatccgtaatggaaatgaaaccttcggaaacatcgtccaacagcacggtggagtccaaagcagagctctgcaaaaacacaatacagtcaagctctccacgggttttcgcctctgttgtagtctgccaacgtaaacgggcagtaccgttccattaagccccgcagtaatccctgtctccggggttccaccaagcttttcagaagtgacctaacggtgaagcttcccaaaactttcaccgccttggcgagcaaccgccgcgtccgacgggcacagcatcgcacagaaagctcatccaagtttttacaataggtacagcccaacaccaccatattattcatgattccataactaaaaaaactccacccaaatgacatgcgctccaacactatagccgcatgcccatcatacagcaagcgaatatacataatatgtctacctctgacaaacacgctccccataaataacacttccttgggcatgccacagtttacaatttctcgataccaagggaatctcaagttatacagtgaaccataaatcatcattttaaaccagtttgctaacactacaccgcccgccttacattgaagagacccaggtttattacagtgacagtgtatagtccagcgctcaaaacctcttacaatttgattaaaatcaacattaagagtggcacaacaaacacaaacacgcatgtaaattctacacacatgcttttcccatttagacagtatcatgtcccaccacattggccattcctgcaatactataaagggagcacaagatggaatagacctcacctcgctcacataatgcatattcaaatgttcacactctaaaagtccaggagtcctttccattgtggcaatgggcacaaaatcctcagagggaggtggaaggcggtgggtttggtacgaactcagtttgtagcgaaaccatctgtcgcgttgcatcataaattaaaagctcgcgcacagcttcgtacttctgttttaaaaagcgaacacgctgccaacaaatgttcgcaaaccgacggtttcgttggcgcgctctttcagttttcagggcagtgttcagccactcctgcagtccacttaacagctcctcagcccgtggagatatgctgacatcataccttattatgtccccataaacgttcaaacagcaggttaaagccaactccaaccaagcaatacaaaggccttgatcccgactcactggaggtggagggagagacggaagaggcataattattccagacggttgtaaagccagccaaagtgcaagtcacgaagatcacacctctccccaccgctgcgttggtaaaaaattacagccaagtcaaaaaagatgcgattttccaaattaccaatcaccgcttccactaaggctggcacacgcacttcaagaaacacaaacatagcaaaagcattttcctcaaaatcttcaaacattaagctgcaatcttgaataactcccaaataattttctgcttgccacccgcgcaacacatccattaaaatttcttgtagactggcgccatgcaattcaaaaagcttgttgagagcgccctctactgtcatacgcaggcacaccttcatggttgaaaaagatcaggttcccgtgtcacctgcagttcatttaaaagatcaacatcaggctcaaaaccccgatcccgaatctccgtgcgtagcattaattgtacaaagtcatccaaatcattgcatataagctctgtcagttcgctatcaggaagcagctcaggcgatgctacacaacaaatcatttctagcgtgggagctaaagacgttaaagtaaagccacaataagcagcttgaaaaactggagtaacacaatgtaaaatgtgcagcaaaaactccgacatgtttgtctttaaaaaatctaccacagaaatgtccatattatttaaataaaacatcaggggctgaggaaccaccaccgaaataaaaataggtcgtaacaaaaacattgtgtcctgcaacaaaaaaaaatattaatgcccaaagcacctaggaaaaccttatgcctccctttatacccgctgccccgtcttaccgcgacaaagcacacagaacaaaacacactacacagacgcacacaatatttatacactccctttatcgtcaaaagtccacaaaaactccaaaggtcacaaaaacccgcgcaaaaaacaccgccaacgtaacacgtccgccgcgccactccccaaccttcgaccccaacgtcattcacctccaccctttcccaccccgcctacctatacgtcacttcgcaccacccctagcccctcctcactcattatcatattggctcgtttccagctttaaggtatattattgatgatg

SEQ ID NO: 1412 - protein, 866 aa, Escherichia coli
  MISC_FEATURE (1)..(866): Escherichia coli K12
MSTKPLFLLRKAKKSSGEPDVVLWASNDFESTCATLDYLIVKSGKKLSSYFKAVATNFPVVNDLPAEGEIDFTWSERYQLSKDSMTWELKPGAAPDNAHYQGNTNVNGEDMTEIEENMLLPISGQELPIRWLAQHGSEKPVTHVSRDGLQALHIARAEELPAVTALAVSHKTSLLDPLEIRELHKLVRDTDKVFPNPGNSNLGLITAFFEAYLNADYTDRGLLTKEWMKGNRVSHITRTASGANAGGGNLTDRGEGFVHDLTSLARDVATGVLARSMDLDIYNLHPAHAKRIEEIIAENKPPFSVFRDKFITMPGGLDYSRAIVVASVKEAPIGIEVIPAHVTEYLNKVLTETDHANPDPEIVDIACGRSSAPMPQRVTEEGKQDDEEKPQPSGTTAVEQGEAETMEPDATEHHQDTQPLDAQSQVNSVDAKYQELRAELHEARKNIPSKNPVDDDKLLAASRGEFVDGISDPNDPKWVKGIQTRDCVYQNQPETEKTSPDMNQPEPVVQQEPEIACNACGQTGGDNCPDCGAVMGDATYQETFDEESQVEAKENDPEEMEGAEHPHNENAGSDPHRDCSDETGEVADPVIVEDIEPGIYYGISNENYHAGPGISKSQLDDIADTPALYLWRKNAPVDTTKTKTLDLGTAFHCRVLEPEEFSNRFIVAPEFNRRTNAGKEEEKAFLMECASTGKTVITAEEGRKIELMYQSVMALPLGQWLVESAGHAESSIYWEDPETGILCRCRPDKIIPEFHWIMDVKTTADIQRFKTAYYDYRYHVQDAFYSDGYEAQFGVQPTFVFLVASTTIECGRYPVEIFMMGEEAKLAGQQEYHRNLRTLSDCLNTDEWPAIKTLSLPRWAKEYAND

SEQ ID NO: 1413 - DNA, 36964 bp, Adenovirus B11
  MISC_FEATURE (1)..(36964): Adenovirus B11 variant
ggccagtgaattgtaatacgactcactatagggcgaattgggccctctagatgcatgctcgagcggccgccagtgtgatggatatctgcagaattcgcccttccttaattaacctgcaggttacgccccgccctgccactcatcgcagtactgttgtaattcattaagcattctgccgacatggaagccatcacagacggcatgatgaacctgaatcgccagcggcatcagcaccttgtcgccttgcgtataatatttgcccatggtgaaaacgggggcgaagaagttgtccatattggccacgtttaaatcaaaactggtgaaactcacccagggattggctgagacgaaaaacatattctcaataaaccctttagggaaataggccaggttttcaccgtaacacgccacatcttgcgaatatatgtgtagaaactgccggaaatcgtcgtggtattcactccagagcgatgaaaacgtttcagtttgctcatggaaaacggtgtaacaagggtgaacactatcccatatcaccagctcaccgtctttcattgccatacggaattccggatgagcattcatcaggcgggcaagaatgtgaataaaggccggataaaacttgtgcttatttttctttacggtctttaaaaaggccgtaatatccagctgaacggtctggttataggtacattgagcaactgactgaaatgcctcaaaatgttctttacgatgccattgggatatatcaacggtggtatatccagtgatttttttctccattttagcttccttagctcctgaaaatctcgataactcaaaaaatacgcccggtagtgatcttatttcattatggtgaaagttggaacctcttacgtgccgatcaacgtctcattttcgccaaaagttggcccagggcttcccggtatcaacagggacaccaggatttatttattctgcgaagtgatcttccgtcacaggtatttattcggcgcaaagtgcgtcgggtgatgctgccaacttactgatttagtgtatgatggtgtttttgaggtgctccagtggcttctgtttctatcagctgtccctcctgttcagctactgacggggtggtgcgtaacggcaaaagcaccgccggacatcattcgctaccttaggaccgttatagttacgattaccctgttatccctaggccggccgtttaaaccctgcaggatttaaattaattaagcgatcgcgctagcggagtgtatactggcttactatgttggcactgatgagggtgtcagtgaagtgcttcatgtggcaggagaaaaaaggctgcaccggtgcgtcagcagaatatgtgatacaggatatattccgcttcctcgctcactgactcgctacgctcggtcgttcgactgcggcgagcggaaatggcttacgaacggggcggagatttcctggaagatgccaggaagatacttaacagggaagtgagagggccgcggcaaagccgtttttccataggctccgcccccctgacaagcatcacgaaatctgacgctcaaatcagtggtggcgaaacccgacaggactataaagataccaggcgtttccccctggcggctccctcgtgcgctctcctgttcctgcctttcggtttaccggtgtcattccgctgttatggccgcgtttgtctcattccacgcctgacactcagttccgggtaggcagttcgctccaagctggactgtatgcacgaaccccccgttcagtccgaccgctgcgccttatccggtaactatcgtcttgagtccaacccggaaagacatgcaaaagcaccactggcagcagccactggtaattgatttagaggagttagtcttgaagtcatgcgccggttaaggctaaactgaaaggacaagttttggtgactgcgctcctccaagccagttacctcggttcaaagagttggtagctcagagaaccttcgaaaaaccgccctgcaaggcggttttttcgttttcagagcaagagattacgcgcagaccaaaacgatctcaagcgatcgcgtttaaacaagggcgaattccagcacactggcggccgttactagtggatccgagctcggtaccaagcttgatgcatagcttgagtattctatagtgtcacctaaatagcttggccatcatcaataatataccttatagatggaatggtgccaatatgtaaatgaggtgattttaaaaagtgtggatcgtgtggtgattggctgtggggttaacggctaaaaggggcggtgcgaccgtgggaaaatgacgttttgtgggggtggagtttttttgcaagttgtcgcgggaaatgtgacgcataaaaaggcttttttctcacggaactacttagttttcccacggtatttaacaggaaatgaggtagttttgaccggatgcaagtgaaaattgttgattttcgcgcgaaaactgaatgaggaagtgtttttctgaataatgtggtatttatggcagggtggagtatttgttcagggccaggtagactttgacccattacgtggaggtttcgattaccgtgttttttacctgaatttccgcgtaccgtgtcaaagtcttctgtttttacgtaggtgtcagctgatcgctagggtatttatacctcagggtttgtgtcaagaggccactcttgagtgccagcgagaagagttttctcctctgcgccggcagtttaataataaaaaaatgagagatttgcgatttctgcctcaggaaataatctctgctgagactggaaatgaaatattggagcttgtggtgcacgccctgatgggagacgatccggagccacctgtgcagctttttgagcctcctacgcttcaggaactgtatgatttagaggtagagggatcggaggattctaatgaggaagctgtaaatggcttttttaccgattctatgcttttagctgctaatgaagggttagaattagatccgcctttggacacttttgatactccaggggtaattgtggaaagcggtacaggtgtaagaaaattacctgatttgagttccgtggactgtgatttgcactgctatgaagacgggtttcctccgagtgatgaggaggaccatgaaaaggagcagtccatgcagactgcagcgggtgagggagtgaaggctgccaatgttggttttcagttggattgcccggagcttcctggacatggctgtaagtcttgtgaatttcacaggaaaaatactggagtaaaggaactgttatgttcgctttgttatatgagaacgcactgccactttatttacagtaagtgtgtttaagttaaaatttaaaggaatatgctgtttttcacatgtatattgagtgtgagttttgtgcttcttattataggtcctgtgtctgatgctgatgaatcaccatctcctgattctactacctcacctcctgagattcaagcacctgttcctgtggacgtgcgcaagcccattcctgtgaagcttaagcctgggaaacgtccagcagtggaaaaacttgaggacttgttacagggtggggacggacctttggacttgagtacacggaaacgtccaagacaataagtgttccatatccgtgtttacttaaggtgacgtcaatatttgtgtgacagtgcaatgtaataaaaatatgttaactgttcactggtttttattgctttttgggcggggactcaggtatataagtagaagcagacctgtgtggttagctcataggagctggctttcatccatggaggtttgggccattttggaagaccttaggaagactaggcaactgttagagaacgcttcggacggagtctccggtttttggagattctggttcgctagtgaattagctagggtagtttttaggataaaacaggactataaacaagaatttgaaaagttgttggtagattgcccaggactttttgaagctcttaatttgggccatcaggttcactttaaagaaaaagttttatcagttttagacttttcaaccccaggtagaactgctgctgctgtggcttttcttacttttatattagataaatggatcccgcagactcatttcagcaggggatacgttttggatttcatagccacagcattgtggagaacatggaaggttcgcaagatgaggacaatcttaggttactggccagtgcagcctttgggtgtagcgggaatcctgaggcatccaccggtcatgccagcggttctggaggaggaacagcaagaggacaacccgagagccggcctggaccctccagtggaggaggcggagtagctgacttgtctcctgaactgcaacgggtgcttactggatctacgtccactggacgggataggggcgttaagagggagagggcatctagtggtactgatgctagatctgagttggctttaagtttaatgagtcgcagacgtcctgaaaccatttggtggcatgaggttcagaaagagggaagggatgaagtttctgtattgcaggagaaatattcactggaacaggtgaaaacatgttggttggagcctgaggatgattgggaggtggccattaaaaattatgccaagatagctttgaggcctgataaacagtataagattactagacggattaatatccggaatgcttgttacatatctggaaatggggctgaggtggtaatagatactcaagacaaggcagttattagatgctgcatgatggatatgtggcctggggtagtcggtatggaagcagtaacttttgtaaatgttaagtttaggggagatggttataatggaatagtgtttatggccaataccaaacttatattgcatggttgtagcttttttggtttcaacaatacctgtgtagatgcctggggacaggttagtgtacggggatgtagtttctatgcgtgttggattgccacagctggcagaaccaagagtcaattgtctctgaagaaatgcatatttcaaagatgtaacctgggcattctgaatgaaggcgaagcaagggtccgccactgcgcttctacagatactggatgttttattttgattaagggaaatgccagcgtaaagcataacatgatttgcggtgcttccgatgagaggccttatcaaatgctcacttgtgctggtgggcattgtaatatgctggctactgtgcatattgtttcccatcaacgcaaaaaatggcctgtttttgatcacaatgtgatgacgaagtgtaccatgcatgcaggtgggcgtagaggaatgtttatgccttaccagtgtaacatgaatcatgtgaaagtgttgttggaaccagatgccttttccagaatgagcctaacaggaatttttgacatgaacatgcaaatctggaagatcctgaggtatgatgatacgagatcgagggtacgcgcatgcgaatgcggaggcaagcatgccaggttccagccggtgtgtgtagatgtgactgaagatctcagaccggatcatttggttattgcccgcactggagcagagttcggatccagtggagaagaaactgactaaggtgagtattgggaaaactttggggtgggattttcagatggacagattgagtaaaaatttgttttttctgtcttgcagctgtcatgagtggaaacgcttcttttaaggggggagtcttcagcccttatctgacagggcgtctcccatcctgggcaggagttcgtcagaatgttatgggatctactgtggatggaagacccgtccaacccgccaattcttcaacgctgacctatgctactttaagttcttcacctttggacgcagctgcagctgccgccgccgcttctgttgccgctaacactgtgcttggaatgggttactatggaagcatcatggctaattccacttcctctaataacccttctaccctgactcaggacaagttacttgtccttttggcccagctggaggctttgacccaacgtctgggtgaactttctcagcaggtggtcgagttgcgagtacaaactgagtctgctgtcggcacggcaaagtctaaataaaaaaatcccagaatcaatgaataaataaacaagcttgttgttgatttaaaatcaagtgtttttatttcatttttcgcgcacggtatgccctagaccaccgatctctatcattgagaactcggtggattttttccaggatcctatagaggtgggattgaatgtttagatacatgggcattaggccgtctttggggtggagatagctccattgaagggattcatgctccggggtagtgttgtaaatcacccagtcataacaaggtcgcagtgcatggtgttgcacaatatcttttagaagtaggctgattgccacagataagcccttggtgtaggtgtttacaaaccggttgagctgggatgggtgcattcggggtgaaattatgtgcattttggattggatttttaagttggcaatattgccgccaagatcccgtcttgggttcatgttatgaaggaccaccaagacggtgtatccggtacatttaggaaatttatcgtgcagcttggatggaaaagcgtggaaaaatttggagacacccttgtgtcctccaagattttccatgcactcatccatgataatagcaatggggccgtgggcagcggcgcgggcaaacacgttccgtgggtctgacacatcatagttatgttcctgagttaaatcatcataagccattttaatgaatttggggcggagagtaccagattggggtatgaatgttccttcgggccccggagcatagttcccctcacagatttgcatttcccaagctttcagttccgagggtggaatcatgtccacctggggggctatgaaaaacaccgtttctggggcgggggtgattaattgtgatgatagcaaatttctgagcaattgagatttgccacatccggtggggccataaatgattccgattacgggttgcaggtggtagtttagggaacggcaactgccgtcttctcgaagcaagggggccacctcgttcatcatttcccttacatgcatattttcccgcaccaaatccattaggaggcgctctcctcctagtgatagaagttcttgtagtgaggaaaagtttttcagcggtttcagaccgtcagccatgggcattttggagagagtttgctgcaaaagttctagtctgttccacagttcagtgatgtgttctatggcatctcgatccagcagacctcctcgtttcgcgggtttggacggctcctggaatagggtatgagacgatgggcgtccagcgctgccagggttcggtccttccagggtctcagtgttcgagtcagggttgtttccgtcacagtgaaggggtgtgcgcctgcttgggcgcttgccagggtgcgcttcagactcatcctgctggtcgaaaacttctgtcgcttggcgccctgtatgtcggccaagtagcagtttaccatgagttcgtagttgagcgcctcggctgcgtggcctttggcgcggagcttacctttggaagttttcttgcataccgggcagtataggcatttcagcgcatacaacttgggcgcaaggaaaacggattctggggagtatgcatctgcgccgcaggaggcgcaaacagtttcacattccaccagccaggttaaatccggttcattggggtcaaaaacaagttttccgccatattttttgatgcgtttcttacctttggtctccatgagttcgtgtcctcgttgagtgacaaacaggctgtccgtgtccccgtagactgattttacaggcctcttctccagtggagtgcctcggtcttcttcgtacaggaactctgaccactctgatacaaaggcgcgcgtccaggccagcacaaaggaggctatgtgggaggggtagcgatcgttgtcaaccagggggtccaccttttccaaagtatgcaaacacatgtcaccctcttcaacatccaggaatgtgattggcttgtaggtgtatttcacgtgacctggggtccccgctgggggggtataaaagggggcggttctttgctcttcctcactgtcttccggatcgctgtccaggaacgtcagctgttggggtaggtattccctctcgaaggcgggcatgacctctgcactcaggttgtcagtttctaagaacgaggaggatttgatattgacagtgccggttgagatgcctttcatgaggttttcgtccatttggtcagaaaacacaatttttttattgtcaagtttggtggcaaatgatccatacagggcgttggataaaagtttggcaatggatcgcatggtttggttcttttccttgtccgcgcgctctttggcggcgatgttgagttggacatactcgcgtgccaggcacttccattcggggaagatagttgttaattcatctggcacgattctcacttgccaccctcgattatgcaaggtaattaaatccacactggtggccacctcgcctcgaaggggttcattggtccaacagagcctacctcctttcctagaacagaaagggggaagtgggtctagcataagttcatcgggagggtctgcatccatggtaaagattcccggaagtaaatccttatcaaaatagctgatgggagtggggtcatctaaggccatttgccattctcgagctgccagtgcgcgctcatatgggttaaggggactgccccatggcatgggatgggtgagtgcagaggcatacatgccacagatgtcatagacgtagatgggatcctcaaagatgcctatgtaggttggatagcatcgcccccctctgatacttgctcgcacatagtcatatagttcatgtgatggcgctagcagccccggacccaagttggtgcgattgggtttttctgttctgtagacgatctggcgaaagatggcgtgagaattggaagagatggtgggtctttgaaaaatgttgaaatgggcatgaggtagacctacagagtctctgacaaagtgggcataagattcttgaagcttggttaccagttcggcggtgacaagtacgtctagggcgcagtagtcaagtgtttcttgaatgatgtcataacctggttggtttttcttttcccacagttcgcggttgagaaggtattcttcgcgatccttccagtactcttctagcggaaacccgtctttgtctgcacggtaagatcctagcatgtagaactgattaactgccttgtaagggcagcagcccttctctacgggtagagagtatgcttgagcagcttttcgtagcgaagcgtgagtaagggcaaaggtgtctctgaccatgactttgagaaattggtatttgaagtcgatgtcgtcacaggctccctgttcccagagttggaagtctacccgtttcttgtaggcggggttgggcaaagcgaaagtaacatcattgaagagaatcttaccggctctgggcataaaattgcgagtgatgcgaaaaggctgtggtacttccgctcgattgttgatcacctgggcagctaggacgatctcgtcgaaaccgttgatgttgtgtcctacgatgtataattctatgaaacgcggcgtgcctctgacgtgaggtagcttactgagctcatcaaaggttaggtctgtggggtcagataaggcgtagtgttcgagagcccattcgtgcaggtgaggatttgcatgtaggaatgatgaccaaagatctaccgccagtgctgtttgtaactggtcccgatactgacgaaaatgccggccaattgccattttttctggagtgacacagtagaaggttctggggtcttgttgccatcgatcccacttgagtttaatggctagatcgtgggccatgttgacgagacgctcttctcctgagagtttcatgaccagcatgaaaggaactagttgtttgccaaaggatcccatccaggtgtaagtttccacatcgtaggtcaggaagagtctttctgtgcgaggatgagagccgatcgggaagaactggatttcctgccaccagttggaggattggctgttgatgtgatggaagtagaagtttctgcggcgcgccgagcattcgtgtttgtgcttgtacagacggccgcagtagtcgcagcgttgcacgggttgtatctcgtgaatgagttgtacctggcttcccttgacgagaaatttcagtgggaagccgaggcctggcgattgtatctcgtgctcttctatattcgctgtatcggcctgttcatcttctgtttcgatggtggtcatgctgacgagcccccgcgggaggcaagtccagacctcggcgcgggaggggcggagctgaaggacgagagcgcgcaggctggagctgtccagagtcctgagacgctgcggactcaggttagtaggtagggacagaagattaacttgcatgatcttttccagggcgtgcgggaggttcagatggtacttgatttccacaggttcgtttgtagagacgtcaatggcttgcagggttccgtgtcctttgggcgccactaccgtacctttgttttttcttttgatcggtggtggctctcttgcttcttgcatgctcagaagcggtgacggggacgcgcgccgggcggcagcggttgttccggacccgagggcatggctggtagtggcacgtcggcgccgcgcacgggcaggttctggtactgcgctctgagaagacttgcgtgcgccaccacgcgtcgattgacgtcttgtatctgacgtctctgggtgaaagctaccggccccgtgagcttgaacctgaaagagagttcaacagaatcaatttcggtatcgttaacggcagcttgtctcagtatttcttgtacgtcaccagagttgtcctggtaggcgatctccgccatgaactgctcgatttcttcctcctgaagatctccgcgacccgctctttcgacggtggccgcgaggtcattggagatacggcccatgagttgggagaatgcattcatgcccgcctcgttccagacgcggctgtaaaccacggccccctcggagtctcttgcgcgcatcaccacctgagcgaggttaagctccacgtgtctggtgaagaccgcatagttgcataggcgctgaaaaaggtagttgagtgtggtggcaatgtgttcggcgacgaagaaatacatgatccatcgtctcagcggcatttcgctaacatcgcccagagcttccaagcgctccatggcctcgtagaagtccacggcaaaattaaaaaactgggagtttcgcgcggacacggtcaattcctcctcgagaagacggatgagttcggctatggtggcccgtacttcgcgttcgaaggctcccgggatctcttcttcctcttctatctcttcttccactaacatctcttcttcgtcttcaggcgggggcggagggggcacgcggcgacgtcgacggcgcacgggcaaacggtcgatgaatcgttcaatgacctctccgcggcggcggcgcatggtttcagtgacggcgcggccgttctcgcgcggtcgcagagtaaaaacaccgccgcgcatctccttaaagtggtgactgggaggttctccgtttgggagggagagggcgctgattatacattttattaattggcccgtagggactgcacgcagagatctgatcgtgtcaagatccacgggatctgaaaacctttcgacgaaagcgtctaaccagtcacagtcacaaggtaggctgagtacggcttcttgtgggcgggggtggttatgtgttcggtctgggtcttctgtttcttcttcatctcgggaaggtgagacgatgctgctggtgatgaaattaaagtaggcagttctaagacggcggatggtggcgaggagcaccaggtctttgggtccggcttgctggatacgcaggcgattggccattccccaagcattatcctgacatctagcaagatctttgtagtagtcttgcatgagccgttctacgggcacttcttcctcacccgttctgccatgcatacgtgtgagtccaaatccgcgcattggttgtaccagtgccaagtcagctacgactctttcggcgaggatggcttgctgtacttgggtaagggtggcttgaaagtcatcaaaatccacaaagcggtggtaagctcctgtattaatggtgtaagcacagttggccatgactgaccagttaactgtctggtgaccagggcgcacgagctcggtgtatttaaggcgcgaataggcgcgggtgtcaaagatgtaatcgttgcaggtgcgcaccagatactggtaccctataagaaaatgcggcggtggttggcggtagagaggccatcgttctgtagctggagcgccaggggcgaggtcttccaacataaggcggtgatagccgtagatgtacctggacatccaggtgattcctgcggcggtagtagaagcccgaggaaactcgcgtacgcggttccaaatgttgcgtagcggcatgaagtagttcattgtaggcacggtttgaccagtgaggcgcgcgcagtcattgatgctctatagacacggagaaaatgaaagcgttcagcgactcgactccgtagcctggaggaacgtgaacgggttgggtcgcggtgtaccccggttcgagacttgtactcgagccggccggagccgcggctaacgtggtattggcactcccgtctcgacccagcctacaaaaatccaggatacggaatcgagtcgttttgctggtttccgaatggcagggaagtgagtcctattttttttttttttgccgctcagatgcatcccgtgctgcgacagatgcgcccccaacaacagcccccctcgcagcagcagcagcagcaatcacaaaaggctgtccctgcaactactgcaactgccgccgtgagcggtgcgggacagcccgcctatgatctggacttggaagagggcgaaggactggcacgtctaggtgcgccttcacccgagcggcatccgcgagttcaactgaaaaaagattctcgcgaggcgtatgtgccccaacagaacctatttagagacagaagcggcgaggagccggaggagatgcgagcttcccgctttaacgcgggtcgtgagctgcgtcacggtttggaccgaagacgagtgttgcgggacgaggatttcgaagttgatgaaatgacagggatcagtcctgccagggcacacgtggctgcagccaaccttgtatcggcttacgagcagacagtaaaggaagagcgtaacttccaaaagtcttttaataatcatgtgcgaaccctgattgcccgcgaagaagttacccttggtttgatgcatttgtgggatttgatggaagctatcattcagaaccctactagcaaacctctgaccgcccagctgtttctggtggtgcaacacagcagagacaatgaggctttcagagaggcgctgctgaacatcaccgaacccgaggggagatggttgtatgatcttatcaacattctacagagtatcatagtgcaggagcggagcctgggcctggccgagaaggtggctgccatcaattactcggttttgagcttgggaaaatattacgctcgcaaaatctacaagactccatacgttcccatagacaaggaggtgaagatagatgggttctacatgcgcatgacgctcaaggtcttgaccctgagcgatgatcttggggtgtatcgcaatgacagaatgcatcgcgcggttagcgccagcaggaggcgcgagttaagcgacagggaactgatgcacagtttgcaaagagctctgactggagctggaaccgagggtgagaattacttcgacatgggagctgacttgcagtggcagcctagtcgcagggctctgagcgccgcgacggcaggatgtgagcttccttacatagaagaggcggatgaaggcgaggaggaagagggcgagtacttggaagactgatggcacaacccgtgttttttgctagatggaacagcaagcaccggatcccgcaatgcgggcggcgctgcagagccagccgtccggcattaactcctcggacgattggacccaggccatgcaacgtatcatggcgttgacgactcgcaaccccgaagcctttagacagcaaccccaggccaaccgtctatcggccatcatggaagctgtagtgccttcccgctctaatcccactcatgagaaggtcctggccatcgtgaacgcgttggtggagaacaaagctattcgtccagatgaggccggactggtatacaacgctctcttagaacgcgtggctcgctacaacagtagcaatgtgcaaaccaatttggaccgtatgataacagatgtacgcgaagccgtgtctcagcgcgaaaggttccagcgtgatgccaacctgggttcgctggtggcgttaaatgctttcttgagtactcagcctgctaatgtgccgcgtggtcaacaggattatactaactttttaagtgctttgagactgatggtatcagaagtacctcagagcgaagtgtatcagtccggtcctgattacttctttcagactagcagacagggcttgcagacggtaaatctgagccaagcttttaaaaaccttaaaggtttgtggggagtgcatgccccggtaggagaaagagcaaccgtgtctagcttgttaactccgaactcccgcctattattactgttggtagctcctttcaccgacagcggtagcatcgaccgtaattcctatttgggttacctactaaacctgtatcgcgaagccatagggcaaagtcaggtggacgagcagacctatcaagaaattacccaagtcagtcgcgctttgggacaggaagacactggcagtttggaagccactctgaacttcttgcttaccaatcggtctcaaaagatccctcctcaatatgctcttactgcggaggaggagaggatccttagatatgtgcagcagagcgtgggattgtttctgatgcaagagggggcaactccgactgcagcactggacatgacagcgcgaaatatggagcccagcatgtatgccagtaaccgacctttcattaacaaactgctggactacttgcacagagctgccgctatgaactctgattatttcaccaatgccatcttaaacccgcactggctgcccccacctggtttctacacgggcgaatatgacatgcccgaccctaatgacggatttctgtgggacgacgtggacagcgatgttttttcacctctttctgatcatcgcacgtggaaaaaggaaggcggcgatagaatgcattcttctgcatcgctgtccggggtcatgggtgctaccgcggctgagcccgagtctgcaagtccttttcctagtctacccttttctctacacagtgtacgtagcagcgaagtgggtagaataagtcgcccgagtttaatgggcgaagaggagtatctaaacgattccttgctcagaccggcaagagaaaaaaatttcccaaacaatggaatagaaagtttggtggataaaatgagtagatggaagacttatgctcaggatcacagagacgagcctgggatcatggggattacaagtagagcgagccgtagacgccagcgccatgacagacagaggggtcttgtgtgggacgatgaggattcggccgatgatagcagcgtgctggacttgggtgggagaggaaggggcaacccgtttgctcatttgcgccctcgcttgggtggtatgttgtaaaaaaaaataaaaaaaaaactcaccaaggccatggcgacgagcgtacgttcgttcttctttattatctgtgtctagtataatgaggcgagtcgtgctaggcggagcggtggtgtatccggagggtcctcctccttcgtacgagagcgtgatgcagcagcagcaggcgacggcggtgatgcaatccccactggaggctccctttgtgcctccgcgatacctggcacctacggagggcagaaacagcattcgttattcggaactggcacctcagtacgataccaccaggttgtatctggtggacaacaagtcggcggacattgcttctctgaactatcagaatgaccacagcaacttcttgaccacggtggtgcaaaacaatgactttacccctacggaagccagcacccagaccattaactttgatgaacgatcgcggtggggcggtcagctaaagaccatcatgcatactaacatgccaaacgtgaacgagtatatgtttagtaacaagttcaaagcgcgtgtgatggtgtccagaaaacctcccgacggtgctgcagttggggatacttatgatcacaagcaggatattttgaaatatgagtggttcgagtttactttgccagaaggcaacttttcagttactatgactattgatttgatgaacaatgccatcatagataattacttgaaagtgggtagacagaatggagtgcttgaaagtgacattggtgttaagttcgacaccaggaacttcaagctgggatgggatcccgaaaccaagttgatcatgcctggagtgtatacgtatgaagccttccatcctgacattgtcttactgcctggctgcggagtggattttaccgagagtcgtttgagcaaccttcttggtatcagaaaaaaacagccatttcaagagggttttaagattttgtatgaagatttagaaggtggtaatattccggccctcttggatgtagatgcctatgagaacagtaagaaagaacaaaaagccaaaatagaagctgctacagctgctgcagaagctaaggcaaacatagttgccagcgactctacaagggttgctaacgctggagaggtcagaggagacaattttgcgccaacacctgttccgactgcagaatcattattggccgatgtgtctgaaggaacggacgtgaaactcactattcaacctgtagaaaaagatagtaagaatagaagctataatgtgttggaagacaaaatcaacacagcctatcgcagttggtatctttcgtacaattatggcgatcccgaaaaaggagtgcgttcctggacattgctcaccacctcagatgtcacctgcggagcagagcaggtctactggtcgcttccagacatgatgaaggatcctgtcactttccgctccactagacaagtcagtaactaccctgtggtgggtgcagagcttatgcccgtcttctcaaagagcttctacaacgaacaagctgtgtactcccagcagctccgccagtccacctcgcttacgcacgtcttcaaccgctttcctgagaaccagattttaatccgtccgccggcgcccaccattaccaccgtcagtgaaaacgttcctgctctcacagatcacgggaccctgccgttgcgcagcagtatccggggagtccaacgtgtgaccgttactgacgccagacgccgcacctgtccctacgtgtacaaggcactgggcatagtcgcaccgcgcgtcctttcaagccgcactttctaaaaaaaaaaaaaatgtccattcttatctcgcccagtaataacaccggttggggtctgcgcgctccaagcaagatgtacggaggcgcacgcaaacgttctacccaacatcctgtccgtgttcgcggacattttcgcgctccatggggcgccctcaagggccgcactcgcgttcgaaccaccgtcgatgatgtaatcgatcaggtggttgccgacgcccgtaattatactcctactgcgcctacatctactgtggatgcagttattgacagtgtagtggctgacgctcgcaactatgctcgacgtaagagccggcgaaggcgcattgccagacgccaccgagctaccactgccatgcgagccgcaagagctctgctacgaagagctagacgcgtggggcgaagagccatgcttagggcggccagacgtgcagcttcgggcgccagcgccggcaggtcccgcaggcaagcagccgctgtcgcagcggcgactattgccgacatggcccaatcgcgaagaggcaatgtatactgggtgcgtgacgctgccaccggtcaacgtgtacccgtgcgcacccgtccccctcgcacttagaagatactgagcagtctccgatgttgtgtcccagcggcgaggatgtccaagcgcaaatacaaggaagaaatgctgcaggttatcgcacctgaagtctacggccaaccgttgaaggatgaaaaaaaaccccgcaaaatcaagcgggttaaaaaggacaaaaaagaagaggaagatggcgatgatgggctggcggagtttgtgcgcgagtttgccccacggcgacgcgtgcaatggcgtgggcgcaaagttcgacatgtgttgagacctggaacttcggtggtctttacacccggcgagcgttcaagcgctacttttaagcgttcctatgatgaggtgtacggggatgatgatattcttgagcaggcggctgaccgattaggcgagtttgcttatggcaagcgtagtagaataacttccaaggatgagacagtgtcgatacccttggatcatggaaatcccacccctagtcttaaaccggtcactttgcagcaagtgttacccgtaactccgcgaacaggtgttaaacgcgaaggtgaagatttgtatcccactatgcaactgatggtacccaaacgccagaagttggaggacgttttggagaaagtaaaagtggatccagatattcaacctgaggttaaagtgagacccattaagcaggtagcgcctggtctgggggtacaaactgtagacattaagattcccactgaaagtatggaagtgcaaactgaacccgcaaagcctactgccacctccactgaagtgcaaacggatccatggatgcccatgcctattacaactgacgccgccggtcccactcgaagatcccgacgaaagtacggtccagcaagtctgttgatgcccaattatgttgtacacccatctattattcctactcctggttaccgaggcactcgctactatcgcagccgaaacagtacctcccgccgtcgccgcaagacacctgcaaatcgcagtcgtcgccgtagacgcacaagcaaaccgactcccggcgccctggtgcggcaagtgtaccgcaatggtagtgcggaacctttgacactgccgcgtgcgcgttaccatccgagtatcatcacttaatcaatgttgccgctgcctccttgcagatatggccctcacttgtcgccttcgcgttcccatcactggttaccgaggaagaaactcgcgccgtagaagagggatgttgggacgcggaatgcgacgctacaggcgacggcgtgctatccgcaagcaattgcggggtggttttttaccagccttaattccaattatcgctgctgcaattggcgcgataccaggcatagcttccgtggcggttcaggcctcgcaacgacattgacattggaaaaaaacgtataaataaaaaaaaaaaaatacaatggactctgacactcctggtcctgtgactatgttttcttagagatggaagacatcaatttttcatccttggctccgcgacacggcacgaagccgtacatgggcacctggagcgacatcggcacgagccaactgaacgggggcgccttcaattggagcagtatctggagcgggcttaaaaattttggctcaaccataaaaacatacgggaacaaagcttggaacagcagtacaggacaggcgcttagaaataaacttaaagaccagaacttccaacaaaaagtagtcgatgggatagcttccggcatcaatggagtggtagatttggctaaccaggctgtgcagaaaaagataaacagtcgtttggacccgccgccagcaaccccaggtgaaatgcaagtggaggaagaaattcctccgccagaaaaacgaggcgacaagcgtccgcgtcccgatttggaagagacgctggtgacgcgcgtagatgaaccgccttcttatgaggaagcaacgaagcttggaatgcccaccactagaccgatagccccaatggccaccggggtgatgaaaccttctcagttgcatcgacccgtcaccttggatttgccccctccccctgctgctactgctgtacccgcttctaagcctgtcgctgccccgaaaccagtcgccgtagccaggtcacgtcccgggggcgctcctcgtccaaatgcgcactggcaaaatactctgaacagcatcgtgggtctaggcgtgcaaagtgtaaaacgccgtcgctgcttttaattaaatatggagtagcgcttaacttgcctatctgtgtatatgtgtcattacacgccgtcacagcagcagaggaaaaaaggaagaggtcgtgcgtcgacgctgagttactttcaagatggccaccccatcgatgctgccccaatgggcatacatgcacatcgccggacaggatgcttcggagtacctgagtccgggtctggtgcagttcgcccgcgccacagacacctacttcaatctgggaaataagtttagaaatcccaccgtagcgccgacccacgatgtgaccaccgaccgtagccagcggctcatgttgcgcttcgtgcccgttgaccgggaggacaatacatactcttacaaagtgcggtacaccctggccgtgggcgacaacagagtgctggatatggccagcacgttctttgacattaggggtgtgttggacagaggtcccagtttcaaaccctattctggtacggcttacaactccctggctcctaaaggcgctccaaatacatctcagtggattgcagaaggtgtaaaaaatacaactggtgaggaacacgtaacagaagaggaaaccaatactactacttacacttttggcaatgctcctgtaaaagctgaagctgaaattacaaaagaaggactcccagtaggtttggaagtttcagatgaagaaagtaaaccgatttatgctgataaaacatatcagccagaacctcagctgggagatgaaacttggactgaccttgatggaaaaaccgaaaagtatggaggcagggctctcaaacccgatactaagatgaaaccatgctacgggtcctttgccaaacctactaatgtgaaaggcggtcaggcaaaacaaaaaacaacggagcagccaaatcagaaagtcgaatatgatatcgacatggagttttttgatgcggcatcgcagaaaacaaacttaagtcctaaaattgtcatgtatgcagaaaatgtaaatttggaaactccagacactcatgtagtgtacaaacctggaacagaagacacaagttccgaagctaatttgggacaacaatctatgcccaacagacccaactacattggcttcagagataactttattggacttatgtactataacagtactggtaacatgggggtgctggctggtcaagcgtctcagttaaatgcagtggttgacttgcaggacagaaacacagaactttcttaccaactcttgcttgactctctgggcgacagaaccagatactttagcatgtggaatcaggctgtggacagttatgatcctgatgtacgtgttattgaaaatcatggtgtggaagatgaacttcccaactactgttttccactggacggcataggtgttccaacaaccagttacaaatcaatagttccaaatggagacaatgcgcctaattggaaggaacctgaagtaaatggaacaagtgagatcggacagggtaatttgtttgccatggaaattaaccttcaagccaatctatggcgaagtttcctttattccaatgtggctctatatctcccagactcgtacaaatacaccccgtccaatgtcactcttccagaaaacaaaaacacctacgactacatgaacgggcgggtggtgccgccatctctagtagacacctatgtgaacattggtgccaggtggtctctggatgccatggacaatgtcaacccattcaaccaccaccgtaacgctggcttgcgttaccgatccatgcttctgggtaacggacgttatgtgcctttccacatacaagtgcctcaaaaattcttcgctgttaaaaacctgctgcttctcccaggctcctacacttatgagtggaactttaggaaggatgtgaacatggttctacagagttccctcggtaacgacctgcgggtagatggcgccagcatcagtttcacgagcatcaacctctatgctacttttttccccatggctcacaacaccgcttccacccttgaagccatgctgcggaatgacaccaatgatcagtcattcaacgactacctatctgcagctaacatgctctaccccattcctgccaatgcaaccaatattcccatttccattccttctcgcaactgggcggctttcagaggctggtcatttaccagactgaaaaccaaagaaactccctctttggggtctggatttgacccctactttgtctattctggttctattccctacctggatggtaccttctacctgaaccacacttttaagaaggtttccatcatgtttgactcttcagtgagctggcctggaaatgacaggttactatctcctaacgaatttgaaataaagcgcactgtggatggcgaaggctacaacgtagcccaatgcaacatgaccaaagactggttcttggtacagatgctcgccaactacaacatcggctatcagggcttctacattccagaaggatacaaagatcgcatgtattcatttttcagaaacttccagcccatgagcaggcaggtggttgatgaggtcaattacaaagacttcaaggccgtcgccataccctaccaacacaacaactctggctttgtgggttacatggctccgaccatgcgccaaggtcaaccctatcccgctaactatccctatccactcattggaacaactgccgtaaatagtgttacgcagaaaaagttcttgtgtgacagaaccatgtggcgcataccgttctcgagcaacttcatgtctatgggggcccttacagacttgggacagaatatgctctatgccaactcagctcatgctctggacatgacctttgaggtggatcccatggatgagcccaccctgctttatcttctcttcgaagttttcgacgtggtcagagtgcatcagccacaccgcggcatcatcgaggcagtctacctgcgtacaccgttctcggccggtaacgctaccacgtaagaagcttcttgcttcttgcaaatagcagctgcaaccatggcctgcggatcccaaaacggctccagcgagcaagagctcagagccattgtccaagacctgggttgcggaccctattttttgggaacctacgataagcgcttcccggggttcatggcccccgataagctcgcctgtgccattgtaaatacggccggacgtgagacggggggagagcactggttggctttcggttggaacccacgttctaacacctgctacctttttgatccttttggattctcggatgatcgtctcaaacagatttaccagtttgaatatgagggtctcctgcgccgcagcgctcttgctaccaaggaccgctgtattacgctggaaaaatctacccagaccgtgcagggtccccgttctgccgcctgcggacttttctgctgcatgttccttcacgcctttgtgcactggcctgaccgtcccatggacggaaaccccaccatgaaattgctaactggagtgccaaacaacatgcttcattctcctaaagtccagcccaccctgtgtgacaatcaaaaagcactctaccattttcttaatacccattcgccttattttcgctcccatcgtacacacatcgaaagggccactgcgttcgaccgtatggatgttcaataatgactcatgtaaacaacgtgttcaataaacatcactttatttttttacatgtatcaaggctctgcattacttatttatttacaagtcgaatgggttctgacgagaatcagaatgacccgcaggcagtgatacgttgcggaactgatacttgggttgccacttgaattcgggaatcaccaacttgggaaccggtatatcgggcaggatgtcactccacagctttctggtcagctgcaaagctccaagcaggtcaggagccgaaatcttgaaatcacaattaggaccagtgctttgagcgcgagagttgcggtacaccggattgcagcactgaaacaccatcagcgacggatgtctcacgcttgccagcacggtgggatctgcaatcatgcccacatccagatcttcagcattggcaatgctgaacggggtcatcttgcaggtctgcctacccatggcgggcacccaattaggcttgtggttgcaatcgcagtgcagggggatcagtatcatcttggcctgatcctgtctgattcctggatacacggctctcatgaaagcatcatattgcttgaaagcctgctgggctttactaccctcggtataaaacatcccgcaggacctgctcgaaaactggttagctgcacagccggcatcattcacacagcagcgggcgtcattgttagctatttgcaccacacttctgccccagcggttttgggtgattttggttcgctcgggattctcctttaaggctcgttgtccgttctcgctggccacatccatctcgataatctgctccttctgaatcataatattgccatgcaggcacttcagcttgccctcataatcattgcagccatgaggccacaacgcacagcctgtacattcccaattatggtgggcgatctgagaaaaagaatgtatcattccctgcagaaatcttcccatcatcgtgctcagtgtcttgtgactagtgaaagttaactggatgcctcggtgctcctcgtttacgtactggtgacagatgcgcttgtattgttcgtgttgctcaggcattagtttaaaagaggttctaagttcgttatccagcctgtacttctccatcagcagacacatcacttccatgcctttctcccaagcagacaccaggggcaagctaatcggattcttaacagtgcaggcagcagctcctttagccagagggtcatctttagcgatcttctcaatgcttcttttgccatccttctcaacgatgcgcacgggcgggtagctgaaacccactgctacaagttgcgcctcttctctttcttcttcgctgtcttgactgatgtcttgcatggggatatgtttggtcttccttggcttctttttggggggtatcggaggaggaggactgtcgctccgttccggagacagggaggattgtgacgtttcgctcaccattaccaactgactgtcggtagaagaacctgaccccacacggcgacaggtgtttctcttcgggggcagaggtggaggcgattgcgaagggctgcggtccgacctggaaggcggatgactggcagaaccccttccgcgttcgggggtgtgctccctgtggcggtcgcttaactgatttccttcgcggctggccattgtgttctcctaggcagagaaacaacagacatggaaactcagccattgctgtcaacatcgccacgagtgccatcacatctcgtcctcagcgacgaggaaaaggagcagagcttaagcattccaccgcccagtcctgccaccacctctaccctagaagataaggaggtcgacgcatctcatgacatgcagaataaaaaagcgaaagagtctgagacagacatcgagcaagacccgggctatgtgacaccggtggaacacgaggaagagttgaaacgctttctagagagagaggatgaaaactgcccaaaacaacgagcagataactatcaccaagatgctggaaatagggatcagaacaccgactacctcatagggcttgacggggaagacgcgctccttaaacatctagcaagacagtcgctcatagtcaaggatgcattattggacagaactgaagtgcccatcagtgtggaagagctcagccgcgcctacgagcttaacctcttttcacctcgtactccccccaaacgtcagccaaacggcacctgcgagccaaatcctcgcttaaacttttatccagcttttgctgtgccagaagtactggctacctatcacatcttttttaaaaatcaaaaaattccagtctcctgccgcgctaatcgcacccgcgccgatgccctactcaatctgggacctggttcacgcttacctgatatagcttccttggaagaggttccaaagatcttcgagggtctgggcaataatgagactcgggccgcaaatgctctgcaaaagggagaaaatggcatggatgagcatcacagcgttctggtggaattggaaggcgataatgccagactcgcagtactcaagcgaagcatcgaggtcacacacttcgcatatcccgctgtcaacctgccccctaaagtcatgacggcggtcatggaccagttactcattaagcgcgcaagtcccctttcagaagacatgcatgacccagatgcctgtgatgagggtaaaccagtggtcagtgatgagcagctaacccgatggctgggcaccgactctcccagggatttggaagagcgtcgcaagcttatgatggccgtggtgctggttaccgtagaactagagtgtctccgacgtttctttaccgattcagaaaccttgcgcaaactcgaagagaatctgcactacacttttagacacggctttgtgcggcaggcatgcaagatatctaacgtggaactcaccaacctggtttcctacatgggtattctgcatgagaatcgcctaggacaaagcgtgctgcacagcaccctgaagggggaagcccgccgtgattacatccgcgattgtgtctatctgtacctgtgccacacgtggcaaaccggcatgggtgtatggcagcaatgtttagaagaacagaacttgaaagagcttgacaagctcttacagaaatctcttaaggttctgtggacagggttcgacgagcgcaccgtcgcttccgacctggcagacctcatcttcccagagcgtctcagggttactttgcgaaacggattgcctgactttatgagccagagcatgcttaacaattttcgctctttcatcctggaacgctccggtatcctgcccgccacctgctgcgcactgccctccgactttgtgcctctcacctaccgcgagtgccccccgccgctatggagtcactgctacctgttccgtctggccaactatctctcctaccactcggatgtgatcgaggatgtgagcggagacggcttgctggagtgtcactgccgctgcaatctgtgcacgccccaccggtccctagcttgcaacccccagttgatgagcgaaacccagataataggcacctttgaattgcaaggccccagcagccaaggcgatgggtcttctcctgggcaaagtttaaaactgaccccgggactgtggacctccgcctacttgcgcaagtttgctccggaagattaccacccctatgaaatcaagttctatgaggaccaatcacagcctccaaaggccgaactttcggcctgcgtcatcacccagggggcaattctggcccaattgcaagccatccaaaaatcccgccaagaatttctactgaaaaagggtaagggggtctaccttgacccccagaccggcgaggaactcaacacaaggttccctcaggatgtcccaacgacgagaaaacaagaagttgaaggtgcagccgccgcccccagaagatatggaggaagattgggacagtcaggcagaggaggcggaggaggacagtctggaggacagtctggaggaagacagtttggaggaggaaaacgaggaggcagaggaggtggaagaagtaaccgccgacaaacagttatcctcggctgcggagacaagcaacagcgctaccatctccgctccgagtcgaggaacccggcggcgtcccagcagtagatgggacgagaccggacgcttcccgaacccaaccagcgcttccaagaccggtaagaaggatcggcagggatacaagtcctggcgggggcataagaatgccatcatctcctgcttgcatgagtgcgggggcaacatatccttcacgcggcgctacttgctattccaccatggggtgaactttccgcgcaatgttttgcattactaccgtcacctccacagcccctactatagccagcaaatcccggcagtctcgacagataaagacagcggcggcgacctccaacagaaaaccagcagcggcagttagaaaatacacaacaagtgcagcaacaggaggattaaagattacagccaacgagccagcgcaaacccgagagttaagaaatcggatctttccaaccctgtatgccatcttccagcagagtcggggtcaagagcaggaactgaaaataaaaaaccgatctctgcgttcgctcaccagaagttgtttgtatcacaagagcgaagatcaacttcagcgcactctcgaggacgccgaggctctcttcaacaagtactgcgcgctgactcttaaagagtaggcagcgaccgcgcttattcaaaaaaggcgggaattacatcatcctcgacatgagtaaagaaattcccacgccttacatgtggagttatcaaccccaaatgggattggcggcaggcgcctcccaggactactccacccgcatgaattggctcagcgccgggccttctatgatttctcgagttaatgatatacgcgcctaccgaaaccaaatacttttggaacagtcagctcttaccaccacgccccgccaacaccttaatcccagaaattggcccgccgccctagtgtaccaggaaagtcccgctcccaccactgtattacttcctcgagacgcccaggccgaagtccaaatgactaatgcaggtgcgcagttagctggcggctccaccctatgtcgtcacaggcctcggcataatataaaacgcctgatgatcagaggccgaggtatccagctcaacgacgagtcggtgagctctccgcttggtctacgaccagacggaatctttcagattgccggctgcgggagatcttccttcacccctcgtcaggctgttctgactttggaaagttcgtcttcgcaaccccgctcgggcggaatcgggaccgttcaatttgtggaggagtttactccctctgtctacttcaaccccttctccggatctcctgggcattacccggacgagttcataccgaacttcgacgcgattagcgagtcagtggacggctacgattgatgtctggtgacgcggctgagctatctcggctgcgacatctagaccactgccgccgctttcgctgctttgcccgggaactcattgagttcatctacttcgaactccccaaggatcaccctcaaggtccggcccacggagtgcggatttctatcgaaggcaaaatagactctcgcctgcaacgaattttctcccagcggcccgtgctgatcgagcgagaccagggaaacaccacggtttccatctactgcatttgtaatcaccccggattgcatgaaagcctttgctgtcttatgtgtactgagtttaataaaaactgaattaagactctcctacggactgccgcttcttcaacccggattttacaaccagaagaacgaaacttttcctgtcgtccaggactctgttaacttcacctttcctactcacaaactagaagctcaacgactacaccgcttttccagaagcattttccctactaatactactttcaaaaccggaggtgagctccaaggtcttcctacagaaaacccttgggtggaagcgggccttgtagtgctaggaattcttgcgggtgggcttgtgattattctttgctacctatacacaccttgcttcactttcttagtggtgttgtggtattggtttaaaaaatggggcccatactagtcttgcttgttttactttcgcttttggaaccgggttctgccaattacgatccatgtctagacttcgacccagaaaactgcacacttacttttgcacccgacacaagccgcatctgtggagttcttattaagtgcggatgggaatgcaggtccgttgaaattacacacaataacaaaacctggaacaataccttatccaccacatgggagccaggagttcccgagtggtacactgtctctgtccgaggtcctgacggttccatccgcattagtaacaacactttcattttttctgaaatgtgcgatctggccatgttcatgagcaaacagtattctctatggcctcctagcaaggacaacatcgtaacgttctccattgcttattgcttgtgcgcttgccttcttactgctttactgtgcgtatgcatacacctgcttgtaaccactcgcatcaaaaacgccaataacaaagaaaaaatgccttaacctctttctgtttacagacatggcttctcttacatctctcatatttgtcagcattgtcactgccgctcatggacaaacagtcgtctctatccctctaggacataattacactctcataggacccccaatcacttcagaggtcatctggaccaaactgggaagcgttgattactttgatataatctgcaacaaaacaaaaccaataatagtaacttgcaacatacaaaatcttacattgattaatgttagcaaagtttacagcggttactattatggttatgacagatacagtagtcaatatagaaattacttggttcgtgttacccagttgaaaaccacgaaaatgccaaatatggcaaagattcgatccgatgacaattctctagaaacttttacatctcccaccacacccgacgaaaaaaacatcccagattcaatgattgcaattgttgcagcggtggcagtggtgatggcactaataataatatgcatgcttttatatgcttgtcgctacaaaaagtttcatcctaaaaaacaagatctcctactaaggcttaacatttaatttctttttatacagccatggtttccactaccacattccttatgcttactagtctcgcaactctgacttctgctcgctcacacctcactgtaactataggctcaaactgcacactaaaaggacctcaaggtggtcatgtcttttggtggagaatatatgacaatggatggtttacaaaaccatgtgaccaacctggtagatttttctgcaacggcagagacctaaccattatcaacgtgacagcaaatgacaaaggcttctattatggaaccgactataaaagtagtttagattataacattattgtactgccatctaccactccagcaccccgcacaactactttctctagcagcagtgtcgctaacaatacaatttccaatccaacctttgccgcgcttttaaaacgcactgtgaataattctacaacttcacatacaacaatttccacttcaacaatcagcattatcgctgcagtgacaattggaatatctattcttgtttttaccataacctactacgcctgctgctatagaaaagacaaacataaaggtgatccattacttagatttgatatttaatttgttctttttttttttatttacagtatggtgaacaccaatcatggtacctagaaatttcttcttcaccatactcatttgtgcatttaatgtttgcgctactttcacagcagtagccacagcaaccccagactgtataggagcatttgcttcctatgcactttttgcttttgttacttgcatctgcgtatgtagcatagtctgcctggttattaattttttccaacttatagactggatccttgtgcgaattgcctacctgcgccaccatcccgaataccgcaaccaaaatatcgcggcacttcttagactcatctaaaaccatgcaggctatactaccaatatttttgcttctattgcttccctacgctgtctcaaccccagctgcctatagtactccaccagaacaccttagaaaatgcaaattccaacaaccgtggtcatttcttgcttgctatcgagaaaaatcagaaattcccccaaatttaataatgattgctggaataattaatataatctgttgcaccataatttcatttttgatataccccctatttgattttggctggaatgctcccaatgcacatgatcatccacaagacccagaggaacacattcccctacaaaacatgcaacatccaatagcgctaatagattacgaaagtgaaccacaacccccactactccctgctattagttacttcaacctaaccggcggagatgactgaaacactcaccacctccaattccgccgaggatctgctcgatatggacggccgcgtctcagaacagcgactcgcccaactacgcatccgccagcagcaggaacgcgcggccaaagagctcagagatgtcatccaaattcaccaatgcaaaaaaggcatattctgtttggtaaaacaagccaagatatcctacgagatcaccgctactgaccatcgcctctcttacgaacttggcccccaacgacaaaaatttacctgcatggtgggaatcaaccccatagttatcacccagcaaagtggagatactaagggttgcattcactgctcctgcgattccatcgagtgcacctacaccctgctgaagaccctatgcggcctaagagacctgctaccaatgaattaaaaaatgattaataaaaaatcacttacttgaaatcagcaataaggtctctgttgaaattttctcccagcagcacctcacttccctcttcccaactctggtattctaaaccccgttcagcggcatactttctccatactttaaaggggatgtcaaattttagctcctctcctgtacccacaatcttcatgtctttcttcccagatgaccaagagagtccggctcagtgactccttcaaccctgtctacccctatgaagatgaaagcacctcccaacacccctttataaacccagggtttatttccccaaatggcttcacacaaagcccaaacggagttcttactttaaaatgtttaaccccactaacaaccacaggcggatctctacagctaaaagtgggagggggacttacagtggatgacaccaacggttttttgaaagaaaacataagtgccaccacaccactcgttaagactggtcactctataggtttaccactaggagccggattgggaacgaatgaaaataaactttgtatcaaattaggacaaggacttacattcaattcaaacaacatttgcattgatgacaatattaacaccttatggacaggagtcaaccccaccgaagccaactgtcaaatcatgaactccagtgaatctaatgattgcaaattaattctaacactagttaaaactggagcactagtcactgcatttgtttatgttataggagtatctaacaattttaatatgctaactacacacagaaatataaattttactgcagagctgtttttcgattctactggtaatttactaactagactctcatccctcaaaactccacttaatcataaatcaggacaaaacatggctactggtgccattactaatgctaaaggtttcatgcccagcacgactgcctatcctttcaatgataattctagagaaaaagaaaactacatttacggaacttgttactacacagctagtgatcgcactgcttttcccattgacatatctgtcatgcttaaccgaagagcaataaatgacgagacatcatattgtattcgtataacttggtcctggaacacaggagatgccccagaggtgcaaacctctgctacaaccctagtcacctccccatttaccttttactacatcagagaagacgactgacaaataaagtttaacttgtttatttgaaaatcaattcacaaaatccgagtagttattttgcctcccccttcccatttaacagaatacaccaatctctccccacgcacagctttaaacatttggataccattagatatagacatggttttagattccacattccaaacagtttcagagcgagccaatctggggtcagtgatagataaaaatccatcgggatagtcttttaaagcgctttcacagtccaactgctgcggatgcgactccggagtctggatcacggtcatctggaagaagaacgatgggaatcataatccgaaaacggtatcggacgattgtgtctcatcaaacccacaagcagccgctgtctgcgtcgctccgtgcgactgctgtttatgggatcagggtccacagtgtcctgaagcatgattttaatagcccttaacatcaactttctggtgcgatgcgcgcagcaacgcattctgatttcactcaaatctttgcagtaggtacaacacattattacaatattgtttaataaaccataattaaaagcgctccagccaaaactcatatctgatataatcgcccctgcatgaccatcataccaaagtttaatataaattaaatgacgttccctcaaaaacacactacccacatacatgatctcttttggcatgtgcatattaacaatctgtctgtaccatggacaacgttggttaatcatgcaacccaatataaccttccggaaccacactgccaacaccgctcccccagccatgcattgaagtgaaccctgctgattacaatgacaatgaagaacccaattctctcgaccgtgaatcacttgagaatgaaaaatatctatagtggcacaacatagacataaatgcatgcatcttctcataatttttaactcctcaggatttagaaacatatcccagggaataggaagctcttgcagaacagtaaagctggcagaacaaggaagaccacgaacacaacttacactatgcatagtcatagtatcacaatctggcaacagcgggtggtcttcagtcatagaagctcgggtttcattttcctcacaacgtggtaactgggctctggtgtaagggtgatgtctggcgcatgatgtcgagcgtgcgcgcaaccttgtcataatggagttgcttcctgacattctcgtattttgtatagcaaaacgcggccctggcagaacacactcttcttcgccttctatcctgccgcttagcgtgttccgtgtgatagttcaagtacaaccacactcttaagttggtcaaaagaatgctggcttcagttgtaatcaaaactccatcgcatctaatcgttctgaggaaatcatccacggtagcatatgcaaatcccaaccaagcaatgcaactggattgtgtttcaagcaggagaggagagggaagagacggaagaaccatgttaatttttattccaaacgatctcgcagtacttcaaattgtagatcgcgcagatggcatctctcgcccccactgtgttggtgaaaaagcacagctagatcaaaagaaatgcgattttcaaggtgctcaacggtggcttccagcaaagcctccacgcgcacatccaagaacaaaagaataccaaaagaaggagcattttctaactcctcaatcatcatattacattcctgcaccattcccagataattttcagctttccagccttgaattattcgtgtcagttcttgtggtaaatccaatccacacattacaaacaggtcccggagggcgccctccaccaccattcttaaacacaccctcataatgacaaaatatcttgctcctgtgtcacctgtagcgaattgagaatggcaacatcaattgacatgcccttggctctaagttcttctttaagttctagttgtaaaaactctctcatattatcaccaaactgcttagccagaagccccccgggaacaagagcaggggacgctacagtgcagtacaagcgcagacctccccaattggctccagcaaaaacaagattggaataagcatattgggaaccgccagtaatatcatcgaagttgctggaaatataatcaggcagagtttcttgtaaaaattgaataaaagaaaaatttgccaaaaaaacattcaaaacctctgggatgcaaatgcaataggttaccgcgctgcgctccaacattgttagttttgaattagtctgcaaaaataaaaaaaaaaacaagcgtcatatcatagtagcctgacgaacagatggataaatcagtctttccatcacaagacaagccacagggtctccagctcgaccctcgtaaaacctgtcatcatgattaaacaacagcaccgaaagttcctcgcggtgaccagcatgaataattcttgatgaagcatacaatccagacatgttagcatcagttaacgagaaaaaacagccaacatagcctttgggtataattatgcttaatcgtaagtatagcaaagccacccctcgcggatacaaagtaaaaggcacaggagaataaaaaatataattatttctctgctgctgttcaggcaacgtcgcccccggtccctctaaatacacatacaaagcctcatcagccatggcttaccagacaaagtacagcgggcacacaaagcacaagctctaaagtgactctccaacctctccacaatatatatatacacaagccctaaactgacgtaatgggagtaaagtgtaaaaaatcccgccaaacccaacacacaccccgaaactgcgtcaccagggaaaagtacagtttcacttccgcaatcccaacaggcgtaacttcctctttctcacggtacgtgatatcccactaacttgcaacgtcattttcccacggtcgcaccgccccttttagccgttaaccccacagccaatcaccacacgatccacactttttaaaatcacctcatttacatattggcaccattccatctataaggtatattattgatgatg

SEQ ID NO: 1414 - DNA, 33323 bp, Adenovirus D8
  MISC_FEATURE (1)..(33323): Adenovirus D8 variant
gccaagctatttaggtgacactatagaatactcaagctatgcatcaagcttggtaccgagctcggatccactagtaacggccgccagtgtgctggaattcgcccttgtttaaacgcgatcgcttgagatcgttttggtctgcgcgtaatctcttgctctgaaaacgaaaaaaccgccttgcagggcggtttttcgaaggttctctgagctaccaactctttgaaccgaggtaactggcttggaggagcgcagtcaccaaaacttgtcctttcagtttagccttaaccggcgcatgacttcaagactaactcctctaaatcaattaccagtggctgctgccagtggtgcttttgcatgtctttccgggttggactcaagacgatagttaccggataaggcgcagcggtcggactgaacggggggttcgtgcatacagtccagcttggagcgaactgcctacccggaactgagtgtcaggcgtggaatgagacaaacgcggccataacagcggaatgacaccggtaaaccgaaaggcaggaacaggagagcgcacgagggagccgccagggggaaacgcctggtatctttatagtcctgtcgggtttcgccaccactgatttgagcgtcagatttcgtgatgcttgtcaggggggcggagcctatggaaaaacggctttgccgcggccctctcacttccctgttaagtatcttcctggcatcttccaggaaatctccgccccgttcgtaagccatttccgctcgccgcagtcgaacgaccgagcgtagcgagtcagtgagcgaggaagcggaatatatcctgtatcacatattctgctgacgcaccggtgcagccttttttctcctgccacatgaagcacttcactgacaccctcatcagtgccaacatagtaagccagtatacactccgctagcgcgatcgcttaattaatttaaatcctgcagggtttaaacggccggcctagggataacagggtaatcgtaactataacggtcctaaggtagcgaatgatgtccggcggtgcttttgccgttacgcaccaccccgtcagtagctgaacaggagggacagctgatagaaacagaagccactggagcacctcaaaaacaccatcatacactaaatcagtaagttggcagcatcacccgacgcactttgcgccgaataaatacctgtgacggaagatcacttcgcagaataaataaatcctggtgtccctgttgataccgggaagccctgggccaacttttggcgaaaatgagacgttgatcggcacgtaagaggttccaactttcaccataatgaaataagatcactaccgggcgtattttttgagttatcgagattttcaggagctaaggaagctaaaatggagaaaaaaatcactggatataccaccgttgatatatcccaatggcatcgtaaagaacattttgaggcatttcagtcagttgctcaatgtacctataaccagaccgttcagctggatattacggcctttttaaagaccgtaaagaaaaataagcacaagttttatccggcctttattcacattcttgcccgcctgatgaatgctcatccggaattccgtatggcaatgaaagacggtgagctggtgatatgggatagtgttcacccttgttacaccgttttccatgagcaaactgaaacgttttcatcgctctggagtgaataccacgacgatttccggcagtttctacacatatattcgcaagatgtggcgtgttacggtgaaaacctggcctatttccctaaagggtttattgagaatatgtttttcgtctcagccaatccctgggtgagtttcaccagttttgatttaaacgtggccaatatggacaacttcttcgcccccgttttcaccatgggcaaatattatacgcaaggcgacaaggtgctgatgccgctggcgattcaggttcatcatgccgtctgtgatggcttccatgtcggcagaatgcttaatgaattacaacagtactgcgatgagtggcagggcggggcgtaacctgcaggttaattaaggaagggcgaattctgcagatatccatcacactggcggccgctcgagcatgcatctagagggcccaattcgccctatagtgagtcgtattacaattcactggcccatcatcaataatataccccacaaagtaaacaaaagttaatatgcaaatgagcttttaaattttaacggttttagggcagggccaacgttaattggttaataagcggtaatgcagttgacgtcaagacgtacggccggcggttgccgcaaaggcgtggcccaacccggaagcaagtcgcggggccgatgacgtataaaaaagcggactttaaacccggaaacggccgattttcccacggccacgcccggatatgaggtaattttgggcggttgcaaataaaattaggacatggtggcgccaaaactgaatgaggaagtgaaaagcgaaaaataccggtcccgcccagggcggaatatttaccgagggccaacagactttgaccgattacgtggggtttcgattacggtgttttttttcgccaatttccgcgtccgtgttaaatccggtgtttatgttacacatcagctgatccacagggtatttaaaccagttaagcccgtcaagagactactcttgagtgccagcgagtagagttttctctaaactttgcttttaaagtttaagaaaaatgagacacctgcacctcctgtcttcaactgtgcctattgacatggccgcattattgctggaggactatgtaaatacaatattggaggacgaactgcatttatctccgtttgagctgggacccacacttcaggacctatatgatttggaggtaaatgcccaggagaacgacccaaacgaagaggctgtgaatttaatatttccagaatctatgattcttcaggctgacatagccagcgaagctgtacctacttcagtttatacaccgactctgccgcctatacctaaattggaagaggaggataagctagaccttcggtgttatgaggaaggttttcctcccagcgattcagaggacgaacggggtgagcagagcatggctataatctcagactatgcgtgtgtggttgtggaaaatcattttgtgttggacaatcctgaggtgccagggcaaggctgtaaatcctgtcaatatcaccgggaacagaccggagacccaaatgcttcctgcgctctgtgttacatgaaaatgagcttcagctttatttacagtaagtggagtaaatgtaagagaggctaagtgcttaagacattactgtgctttacttgaacagctgtactaagtgtggtttatttttggtactaggtccggtgtcagaggatgagtcatcacctttagaagaagaccacccgtctccccctgatcttacaaatgacacgcccctgcaagtgcgcagacccaccccggttagaccgagtggcgagaggcgagcggctgtttacaaaattgaggatttgttgcaggacgtgggtgggaatgaacctttgaacctgagcttgaaacgccccaggaactaggcgcagctgtgcttagtcatgtgtaaataaagttgtgcaataaaagtatgtgtgacgcatgcaaggtgtggtttatgactcatgggcggggcttagtcctatataagtggtaacacctgggcacttaggcacaaacgttaggaaattcctaatggatgtgtggagtattcttggggaatttaacaagacacgccggcttgtggaggatagttcagacgggtgctccgggttttggagacactggtttggaactcctctatctcgcctggtgtacacagttaagaaggattatagcgaggaatttgaaaatctttttgccgactgctctggcctgctagattctttaaattttggccaccagtcccttttccaggaaagggtactccacagccttgatttttccagcccagggcgcactacagccggggttgcttttgtggtttttttggttgacaaatggagccaggacacccaactaagcaggggctacattctggactttgcagccatgcacctgtggagggcctggatgaggcagcggggacagagaatcttgaactactggcttctacagccagcagcttcgggtcttcttcatctacacagacaaacatccatgttggaggaagaaatgagggaggccatggacaagaacccgaggagcggcctggaccctccgtcggaagaggagctggattaaatgaggtatccagcctatacccagagcttagcaaggtgctgacatccatggccaggggagtgaagagggagaggagcgatgggggcaatactgggctgatgacccagctaactgccagcctgatgaatcgcaagcgcccagagcgtattacctggcacgagctacagcaggagtgcagggatgagataggcctgatgcaggataaatatggcctggagcaaataaaaacccattggttgaacccagacgaggattgggaggaggccattaagaaatatgccaagatagccctgcgcccagattgcaagtacagggtgactaagaccgtgaatattaaacatgcctgctacatctcggggaacggggcagaggtggacatcgatactctggacaagtcagccttcaggtgttgcatgatgggaatgagagcaggagtaatgaatatgaattccatgatctttataaacataaagttcaatggagagaagtttaatggggtactgtttatggccaacagccacatgaccctgcatggttgcagtttttttggctttaacaatatgtgtgcagaggtctggggtgctgctaagattaggggatgtaagttttacggctgctggatgggcgtggttggaagacccaagagcgagatgtctgtaaagcagtgtgtgtttgaaaaatgctacctgggagtctgtaccgagggcaatgctagagtaagacactgctcttccctagagacgggctgcttttgcctggtgaagggcacagcctcgattaagcataatgtggtaaagggctgcacggatgagcgcatgtacaacatgctgacctgcgactcgggggtctgccatatcctgaagaacatccatgtgacctcccaccccagaaaaaagtggccagtgtttgagaataacctgctgattaagtgccatatgcacctgggtgccagaaggggcaccttccagccgtaccagtgcaactttagccagaccaagctgctgttggagaacgatgccttctccagggtgaacctgaacggcatctttgacatggatgtctcggtgtacaagatcctgagatacgatgagaccaagtccagggtgcgcgcttgcgagtgcggtggcagacacaccaggatgcagccagtggccctggatgtgaccgaggagctgcgaccagaccacctggtgatggcctgtaccgggaccgagttcagctccagtggggaggacacagattagaggtaggtttaagtagtgggcgtggctaaggtaagtataaaggcgggtgtcttacaagggtctttttgcttttctgcagacatcatgaacgggaccggcggggcctttgaaggggggctttttagcccttatttgacaacccgcctgccgggatgggccggagttcgtcagaatgtgatgggatcaacggtggacgggcgcccagtgcttccagcaaattcctctaccatgacctacgcgaccgtggggacgagctcgtcgcttgacagcaccgccgcagccgcggcagccgcagccgccatgacagcgacgagactggcctcgagctacatgcccagcagcggtagcagcccctccatccccagttccatcatcgccgaggagaaactgctggccctgctggctgagctggaagccctgagccgccagctgaccgccctgacccaggaggtgtccgagctccgcgaacagcagcagcagcaaaataaatgatttaataaacacagattttgattcaaacagcaaagcatctttattatttattttttcgcgcgcggtaggccctggtccacctctcccgatcattaagagtgcggtggattttttccaggacccggtagaggtgggattggatgttgaggtacatgggcataagcccgtcccgggggtggaggtagcaccactgcatggcctcgtgttctggggttgtgttgtagatgatccagtcatagcaggggcgctgggcgtggtgctggatgatgtccttaaggaggagactgatggccacggggagccccttggtgtaggtgttggcaaagcggttgagctgggagggatgcatgcggggggagatgatgtgtagtttggcctggatcttaaggttggcgatgttaccgcccagatcccgccgggggttcatgttgtgcaggaccaccaggacggtgtagcccgtgcacttggggaacttgtcatgcaacttggaagggaaagcgtggaagaatttggagacgcccttgtgcccgcccaggttttccatgcactcatccatgatgatggcaatgggcccgtgggctgcggctttggcaaagacgtttctggggtcagagacatcgtaattatgctcttgggtgagatcatcataagacattttaatgaatttggggcggagggtgccagattgtgggacgatggttccctcgggccccggggcgaagttcccctcgcagatctgcatctcccaggctttcatctcggagggggggatcatgtccacctgcggggcgatgaaaaaaatggtttccggggcgggggtgatgagctgcgaggagagcaggtttcttaacagctgggacttgccgcacccggttgggccgtagatgaccccgatgacgggttgcaggtggtagttcaaggagatgcagctgccgtcgtcccggaggaggggggctacctggttaagcatgtctctgacttggaggttttcccgaacaagctcgctaaggaggcggtccccgcccagcgagagcagttcttgcagggaagcaaagttttttaggggcttaagcccgtcggccatgggcatcttggcgagggtgtgcgagaggagctccaggcggtcccacagctcggtgacgtgctctacggcatctggatccagcagacttcctcgtttcgggggttgggacgactgcgactgtagggcacaagacgatgggcgtccagcgcaaccagcgtcatgtccttccagggtctcagggtccgcgtgagggtggtctccgtcacggtgaaggggtgggccccgggctgggcgcttgcaagggtgcgcttgagactcatcctgctggtgctgaaacgggcacggtcttcgccctgcgcgtcggcaagatagcagttgaccataagctggtagttaagggtctcggcggcatggcccttggcgcggagcttgcccttggaagagcgcccacaggcgggacagaggagggattgcagggcgtagagtttaggcgcgagaaaaacggactctggggcaaaggcatccgctccgcagtggacgcagacggtctcgcactcaacaagccaggtgagctcgggctgcttggggtcaaaaaccagttttcccccgttctttttgatgcgcttcttacctcgcgtctccatgagtctgtgtccgcgctcggtgacaaacaggctgtcggtgtccccgtagacggacttgattggcctgtcctgcaggggcgtcccgcggtcctcctcgtaaagaaactcggaccactctgagacaaaggcgcgcgtccacgccaagacaaaggaggccacgtgcgaggggtagcggtcattgtccaccagggggtccaccgtttccaccgtgtgcagacacatgtccccctcctccgcatccaagaaggtgattggcttgtaggtgtaggccacgtgaccgggggttcccgacggaggggtataaaagggggcgggtctgtgctcgtcctcactctcttccgcgtcgctgtccacgagcgtcagctgttggggtaggtattgcctctcgagagctggcatgacctcggcactcaggttgtcagtttctagaaacgaggaggatttgatgttggcctgccctgtcgcaatgcttttcaggagactttcatccatctggtcagaaaagactatttttttattgtcaagcttggtggcaaaggagccatagagggcgttggagagaagcttggcgatggatctcatggtctgatttttgtcacggtcggcgcgctccttggccgcaatgttgagctggacatattcgcgcgcaacgcacttccattcgggaaaaacagtggtgcgctcgtcgggcacaatcctgacgcgccagcctcggttatgcagggtgaccaggtccacgctggtggccacctcgccgcgcaggggttcgttggtccagcagaggcgcccgcccttgcgcgagcaaaaaggtggtaacacatcaagcaaatgctcgtcaggggggtccgcatcgatggtgaagatgcccggacagagttccttgtcaaaataatcaatttttaaggatgcatcatccaaggccatttgccacttgcgggcggccagggctcgctcgcaggggttcaggggcggaccccagggcatgggatgcgtaagcgcggaggcgtacatgccgcagatgtcatacacatagatgggctccgagaggatgccgatgtaggtgggataacagcgccccccgcggatgctggcgcgcacgtagtcatacaactcatgcgagggtgccaagaaggcggggccaagattggtacgctggggctgctcggcgcgaaagacgatctggcgaaagatggcatgcgagttggaggaaatagtgggccgttggaagatgttaaagtgggcgtggggcaggcggaccgagtcgcggataaagtgcgcgtaggagtcttgcagcttggcaaccagctcggcagtgacaaggacgtccatggcgcagtagtccagcgtttcgcggataatgtcataacccgtctgtcctttcttctcccacagctcgcggttaagggcgtactcctcgtcatccttccagtactcccggagcgggaatccttgatcgtccgcacggtaagagcccagcatgtagaaatggttaacggccttgtagggacagcagcccttctccacggggagggcgtaagcttgagcggccttgcggagcgaggtgtgcgtcagggcaaaggtgtccctgaccatgactttcaaaaactggtacttaaagtccgagtcgtcgcagccgccgtgttcccatagctcaaaatctgtgcgcttctttgagagggggttaggcagagcgaaagtgacgtcattgaagagaatcttgcctgctcgtggcatgaaattgcgggtgatacggaaagggcccgggacgcaggctcggttgttgataacctgggcggctaggacaatctcgtcaaagccgttgatgttgtgcccgacgatgtatagttccataaatcgcgggcggcctttgatgtgcggcagctttttaagctcctcgtaggtaaggtcctcagggcattgcaggccgtgctgctccagtgcccactcctggagatgtgggttggcttgcatgaaagaagcccagagctcgcgggccataagggtctgaagctcgtcgcgaaagaggcggaactgctggcccacggccatcttttcgggggtgatgcagtaaaaggtaagggggtcccgctcccagcgatcccagcgtaaacgcacggcaagatcgcgagcaagggcgaccagcttggggtccccggagaattttatgaccagcatgaaggggacgagctgcttgccgaaggaccccatccaggtgtaggtttctacatcgtaggtgacaaagagccgctccgtgcgaggatgagagccgattgggaagaactggatttcctgccaccagttggacgagtggctgttgatgtgatgaaagtagaaatccctccggcgaaccgagcactcgtgctgatgcttgtaaaagcgtccgcaatactcgcagcgctgcacgggctgtaccttatccacgagatacacagcgcgtcccttaaggaaaaacttcaggagtggcggccctggctggtggttttcatgttcgcctgcgtaggacttaccctggggctcctcgaggacggagaggctgacaagcccgcgcgggagccaggtccagatctcggcgcggcgggggcggagagcgaagacaagggcgcgcagttgggagctgtccatggtgtcgcggagatccaggtccgggggcagggttctaaggttgaccttgtagaggcgggtgagggcgtgcttgagatgcaaatggtacttgatttctacgggtgagttggtggccgtgtccacgcattgcatgagcccgtagctgcgcggggccacgaccgtgccgcggtgggtttttaaaagcggtgtcgcggacgcgctcccggcggcagcggcggttccggccccatgggcaggggcggcagaggcacgtcggcgtggcgctcgggcaggtcccggtgctgtgccctgagagcgctggcgtgcgcgacgacgcggcggttgacatcctggatctgccgcctctgcgtgaagaccacgggtcccgtgactttgaacctgaaagacagttcaacagaatcaatctcggcgtcattgacggcggcctgccgcaggatctcttgcacgtcgcccgagttgtcctggtaggcgatctcggacatgaactgctcgatctcctcctcctggagatcgccgcgacccgcacgctcgacggtagcggcaaggtcattcgagatgcggtccataagctgcgaaaaggcgcccaggccgctctcgttccagacgcggctgtacaccacgtccccgtcaacgtcgcgcgcgcgcatgaccacctgcgcaaggttaagctccacgtgccgcgtaaaaacggcgtagttgcgcaggcgctgaaaaaggtagttaagggtggtggcaatgtgctcggtaacaaaaaagtacataatccagcggcgcaggggcatttcgctgatgttgccaatggcctccagcctttccatagcctcgtagaagtccacggcgaagttgaaaaactgggcgttgcgggccgataccgtaagctcgtcttccagaagccggatgagctcggcgatggtggcgcgcacctcgcgctcaaaatccccgggggcctcctcttcttcctgttccataacgacctcttcttgtatttcttctgggggcggtggtggtggcggggcccgacgacgacggcgacgcaccgggagacggtcgacgaagcgctcgatcatctccccgcggcggcgacgcatggtttcagtgacggcgcgaccctgttcgcgaggacgcagcgtgaagacgccgccggtcatctcccggtaatagggcgggtccccgttgggtagcgaaagggcgctaacaatgcatcttattaattgcggtgtaggggacgtaagcacgtcaagatcgaccggatcggaaaatttttgaaggaaagcgtctagccaatcgcagtcacaaggtaagcttaaacacgtagcagccctgtggacactgttacaattgcgattgctaatgatgtaattgaagtaggcgtttttcaggcggcggatggtggcaagaaggaccaggtccttgggtcccgcttgctgtatgcggagccgctcggccatgccccaggcctgaccctgacaccggctgaggttcttgtagtagtcatgcatgagcctctcaatgtcatcatttgcggcggaggcggagtcttccatgcgggtgaccccgacgcccctaagcggctgcacgagcgccaggtcggcgacgacacgctcggcgaggatggcctgttgcacgcgggtgagggtgtcttggaagtcgtccatgtcaacaaagcggtggtaggccccggtgttgatggtgtaggtgcagttggccataagcgaccagttaacggtttgcaaaccgggctgcacgacctcggagtacctaagccgcgagaaggcgcgcgagtcaaagacgtagtcgttgcaggtgcgcacaaggtactgatatccgactaggaagtgcggcggcggctggcggtacagcggccagcgctgggtggccggcgcgcccggggccaggtcctcgagcatgaggcggtggtagccgtagaggtagcgggacatccaggtgatgccggcggcggtggtggaggcgcgcgggaactcgcggacgcggttccagatgttgcgcagcggtaggaaataatccatggtcggcacggtctggccggtaagacgtgcgcagtcattgacgctctagaggcaaaaacgaaagcggttgagcaggctcttcctccgtagcctggcggaacgcaaacgggttaggccgcgcgtgtaccccggttcgagtcccctcgaatcaggctaaagccgcgactaacgtggtattggcactcccgtctcgacccaagcccgatagccgccaggatacggtgaagagcctttttgccggccgagtggggtcgctagatttgaaagcggttaaaaaccccgctgggtagtggctcgcgcccgtagtctggacaagcatcactagggttaagttacagcagaacccggttcgcggacggccgcggcaagcgggacttagttaccccgccaatttaaagacccgcagccagccgacttttccagttacgggagcgagcccccttttttctttttgccagatgcatcccgtcctgcgccaaatgcgtcccacccccccggcgaccaccgcaaccgcggccgtagcaggcgccggcgctgtacaacagcagacagagatggacttggaagagggcgaagggctggcgagactgggggcgccgtccccggagcaacacccccgcgtgcagctgcaaaaggacgtgcgcccggcgtacgtgcctgcgcagaacctgttcagggaccgcagtggggaggagcccgaggagatgcgcgactgccggtttcgggcgggcagggagctgcgcgagggcctggaccgccagcgcgtgctgcgcgacgatgattttgagccaaacgagcagacggggatcagccccgcgcgcgcgcacgtggcggcggccaacctggtgacggcctacgagcagacggtaaaacaggagcgcaacttccaaaagagttttaacaaccacgtgcgcaccctgatcgcgcgcgaggaggtggccctgggcctgatgcacctatgggacctggcggaggccatcgtacagaacccgaacagcaagcctctgacggcgcagctgttcctggtggtgcagcacagcagggacaacgaggcgtttagggaggcgctgctaaacattgccgagcccgagggtcgctggctgctggagctaattaacattttgcagagcatcgtagtgcaggagcgcagcctgagcctggccgagaaggtggcggcgatcaactactcggtgctgagcctgggcaagttttacgcgcgcaagatttacaagacgccgtacgtgcccatagacaaggaggtaaagatagacagcttttacatgcgcatggcgctcaaggtgctaacgctgagcgacgacctgggtgtgtaccgcaacgaccgcattcacaaggccgtgagcacaagccggcggcgcgagctaagcgaccgcgagctgatgatgagcctgcgccgggcgctggtagggggcgccgccagcggcgaagagtcctactttgacatgggggcggacctgcattggcagccgagccggcgcgccttggaggccgcctacggtccagaggacttggatgaggatgaggaagaggaggaggatgcacccgctgcggggtactgacgcctccgtaatatgtttttagatgtcccagcagcaagccccggaccccgccataagggcggcgctgcaaagccagccgtccggtctagcatcggacgactgggaggccgcgatgcaacgcatcatggccctgacgacccgcaaccccgagtcctttagacaacagccgcaggccaacagactgtcggccattttggaggcggtggtcccctctcggaccaaccccacgcacgagaaggtgctggcgatcgtgaacgcgctggcggagaacaaggccattcgtcccgacgaggccgggctggtgtacaacgccctgctggagcgcgtgggccgctacaacagcacaaacgtgcagtccaacctggaccggctggtgacggacgtgcgcgaggccgtggcgcagcgcgagcggttcaagaacgagggcctgggctcgctggtggcgctaaacgccttcctggcgacgcagccggcaaacgtgccgcgcgggcaggacgattacaccaattttatcagcgcactgcggctgatggtgaccgaggtgccccagagcgaggtgtaccagtcgggcccggactactttttccagactagcagacagggcctgcagacggtaaacctgagccaggctttcaagaacctgcgcgggctgtggggcgtgcaggcgcccgtgggcgaccggtcgacggtgagcagcttgctgacgcccaactcgcggctgctgctgctgctgatcgcacccttcaccgacagcggcagcgtaaaccgcaactcgtacctgggccacctgctgacgctgtaccgcgaggccataggccaggcgcaggtggacgagcaaaccttccaggagatcacgagcgtaagccgcgcactggggcagaacgacaccgacagtctaagggccacccttaacttcttgctgaccaatagacagcagaagatcccggcgcaatatgcgctgtcggccgaggaagaaaggattctgagatatgtgcagcagagcgtagggctgttcctgatgcaggagggggccacccccagcgccgcgctggacatgaccgcgcgcaacatggaacctagcatgtacgccgccaaccggccgtttattaataagctgatggactacctgcaccgcgcggcgtccatgaactcggactactttaccaatgccatcttgaacccgcattggctcccgccgccagggttctacacgggcgagtacgacatgcccgaccccaacgatgggtttttgtgggacgacgtggacagcgcggtgttctccccaattttgcaaaagcgccaggaggcggtgcgcacgcccgcgagcgagggcgcggtgggtcggagcccctttcctagcttgggcagcttgcatagcctgcctgactcagtaaacagcggcagggtgagtcggccgcatttgctgggcgaggacgagtacctgaacgactcgctgctgcggccgccgcgggccaagaacgccatggccaataacgggatagaaagtctggtggacaaactgaaccgctggaagacctacgctcaggaccatagggaacctgcgcccgcgccgcggcgacagcgccacgaccggcagcggggcctggtgtgggacgacgaggactcggccgacgatagcagcgtgttggacttgggcgggagcggtagggttaacccgttcgcgcatctgcagcccagactggggcgacggatgttttaaatgcaaaataaaactcaccaaggccatagcgtgcgttctcttccttgttagaaatgaggcgcgcggtggtgtcctctcctcctccctcgtacgaaagcgtgatggcgcaggcgaccctggaggttccgtttgtgcctccgcggtatatggctcctacggagggcagaaacagcattcgttactcggagctggctccgcagtacgacaccactcgcgtgtacttggtggacaacaagtcggcggacatcgcttccctcaactaccaaaacgaccacagcaacttcctaaccacggtggtgcagaacaacgatttcacccccgccgaggccagcacgcagacgataaattttgacgagcggtcccggtggggcggtgatctgaagaccattttgcacaccaacatgcccaatgtgaacgagtacatgttcaccagcaagtttaaggcgcgggtgatggtggctaggaagcacccacagggggtagctgaaacagatttaagtcaggataagcttgaatatgagtggtttgagtttaccctgcccgagggcaatttttccgagaccatgaccatagacctgatgaacaacgccatcttggaaaactacttgcaagtggggcggcaaaatggcgtgctggagagcgatattggagttaagtttgacagcagaaatttcaagctgggctgggacccggtgactaagctggtgatgccgggggtctacacatacgaggccttccatcccgacgtggtgctgctgccgggctgcggggtggacttcaccgagagccgcctgagcaaccttctgggcattcgcaagaagcaacctttccaagagggcttcaggattatgtatgaggatctagaagggggcaacatccccgccctgctggatgtggaagcatacctcaaaagcaagaatgatcgggaggaagccacccagaatgcaaacagagttgctgcaaatggaggtggtgaaattaggggagatacttttcttaccaccgaacagctaagagccgctgacaaggagctggttattaagcccattaaggaagatgctagcaagagaagctataatgtcataggggacacccatgacaccctgtaccgcagctggtacctgtcctatacctacggggaccccgagaagggggtacagtcgtggacgctgctcaccaccccggacgtcacctgcggcgcggagcaagtctactggtcgctgccggacctcatgcaagaccccgtcaccttccgctccacccagcaagtcagcaactaccccgtggttggcgccgagctcatgcccttccgcgccaagagcttttacaacgatctcgccgtctactcccagctcatccgcagctacacctccctcacccacgtcttcaaccgcttccccgacaaccagatcctgtgtcgcccgcccgcgcccaccatcaccaccgttagtgaaaacgtgcctgctctcacagatcacgggacgctaccgctgcgcagcagtatccgcggagtccagcgagtgaccgttactgacgcccgtcgccgcacctgtccctacgtctacaaggccctgggcatagtcgcgccgcgcgtgctctctagtcgcaccttttaaaaaatgtccattcttatctcgcccagcaataacaccggctggggtcttactaggcccagcaccatgtacggaggagccaagaagcgctccgatcagcaccccgttcgcgtccgcggccactttcgcgctccctggggcgcttacaagcgcgggcggacctctgcccccgccgccgtgcgcaccaccgtcgacgatgtcattgactcggtagtcgctgacgcgcgcaactacacccccgccccctccaccgtggacgcggtcattgacagcgtggtggctgacgcgcgcgactatgccagacgcaagagccggcggcgacgcattgccaggcgccaccggagcacgcccgccatgcgcgccgcccgggctctgctgcgccgtgccagacgcactggccgccgggccatgttgcaagccgcgcgtcgcgccgccgccgcacccacccccacaggcaggactcgcagacgagcggccgttgccgccgccgcggccatctctagcatgaccagacccaggcgcggaaacgtgtactgggtgcgcgactccatcacgggcgtgcgcgtgcccgtgcgcacccgtcctcctcgtccctgatctaatgcttgtgtcctcccccgcaagcgacaatgtcaaagcgcaaaatcaaggaggagatgctccaggtcgtcgccccggagatttacggaccaccccaggcggaccagaaaccccgcaaaatcaagcgggttaaaaaaaaggatgaggtggacaaggaggcagtagagtttgtgcgcgagtttgctccgcggcggcgcgtaaattggaaggggcgcagggtgcagcgcgtgttgcggcccggcacggcggtggtgttcacgcccggcgagcggtcctcggtcaggagcaagcgtagctatgacgaggtgtatggcgacgacgacatcctggaccaggcggcggagcgggcgggcgagttcgcctacgggaagcggtcgcgcgaagaggagctgatctcgctgccgctggacgagagcaaccccacgccgagcctgaagcccgtgaccctgcagcagatgctgccccaagcagtgctgctgccgagccgcggggttaagcgcgagggcgagaacatgtacccgaccatgcagatcatggtgcccaagcgtcggcgcgtggaggacgtgctggacaccgtgaaaatggatgtggagccccaggtcaaggtgcgccccatcaagcaggtggcgccgggcctgggcgtgcagaccgtggacattcaaatccccaccgacatggatgtcgacaaaaaaccctcgaccagcatcgaggtgcagaccgacccctggctcctagcctccaccgccgccacggccaccgagcctcccaggaggcgaagatggggccctgccaaccggttgatgcccaactacgtgttgcatccttccatcattccgacgccgggctaccgcggcacccggtattacgccagccgcaggcgccccgcaggcaagcgccgtcgccgcaccaccacccgccgccgtctggcccccgcccgcgtgcgccgcgtaactacgcgccggggccgctcgcttgttctgcccaccgtgcgctaccaccccagcatcctttaattcgtgtgctgtgatactgttgcagagagatggctctcacttgccgcctgcgcattcccgtcccgaattaccgaggaagatcccgccgcaggagaggcatggcaggcagcggcctaaaccgccgccggcggcgggccatgcgcaggcgcctaagtggcgggttcctgcctgcgcttatccccataatcgccgcggccattggcacgatcccgggcatagcttccgttgcgctgcaagcgtcgcagcgccgttaatgtgcaaataaagcctctttagactctgacacacctggtcctgtatatttttagaatggaagacatcaattttgcgtccctggctccgcggcacggcacgcggccgttcatgggcacctggaacgagatcggcaccagccagctgaacgggggcgccttcaattggagcagtgtctggagcgggcttaaaaatttcggctcaacgctccggacctatgggaacaaggcctggaatagtagcacagggcagatgttgagggaaaagcttgcagaccaaaacttccagcaaaaggtggtggacggcctggcctcgggcattaacggggtagtggacattgcaaaccaggccgtgcagcgcgagataaacagccgcctgaacccgcggccgcccacggtagtggagatggaagatgcaactcttccccccaggggcgagaagcggccgcggcctgacgcggaggagacaaccctgcaggtagacgagccgccctcgtacgaggaggccctcaaggccggcatgcccaccacacgcatcattgcgccaatggccacgggtgtcatgaaacccgccacccttgacctgccttcaccacccgtgcccgctccaccaaaggcagctccggttgagcaggcccccccggtggcaaccgccgtgcgccgcgttcccgcccgccgccaggcccagaactggcagagcacgctacacagtatcgtgggcctaggagtgaaaagtctgaagcgccgccgatgctattaagaaaggaaagaggacactaaagggagagcttaacttgtatgtgccttaccgccagagaacgcgcgaagatggccaccccctcgatgatgccgcagtgggcgtacatgcacatcgccgggcaggacgcctcggagtacctgagcccgggtctggtgcagtttgcccgtgccaccgacacgtacttcagcctgggcaacaagtttagaaaccccacggtggctcccacccacgatgtgaccacggaccggtcccagcgtctgacgctgcgctttgtgcccgtggatcgcgaggacaccacgtactcgtacaaggcgcgcttcactctggccgtgggcgacaaccgggtgctagacatggccagcacgtactttgacatccgcggcgtcctggaccgcggtcccagcttcaaaccctactcgggcacggcttacaacagcctggctcccaagggcgcccccaatcccagtcagtgggaacaggcaaaaacaggagctggtgtagaccaaaatcaaaaagaaactcgcacttacggcgtagccgccactggcggatataacattacaaaagaaggacttcagattggaattgatgaaactaaagaagatccaaacaacaaaatttatgcagataaaacattccagccggaaccacaaataggggaaaataattggcaggacactaatgttttctatggcggcagagctcttaaaaaggaaaccaagatgaaaccatgctatggctcatttgccagaccaactaataaaaaaggagggcaggctaaagttttaaccactgaagatggtcaacctacagaaaactttgacatagacttggctttctttgatattccacaagctggtggaaatgacaatcttgatccagatatgattctgtatgccgaaaatgtaaatctagaaacacctgacacacatgtagtttataaaccaggcaaggatgatgcaagttctgccgctaacctcacacaacagtccatgccaaacagacccaactacatcggtttcagggacaactttgtgggacttatgtattacaacagcactggcaacatgggtgtgctggctggtcaggcctctcagttaaatgctgtggtcgacttgcaagacagaaataccgagctgtcttatcagcttttattagattctctgggtgacaggaccagatactttagtatgtggaactctgcggtggacagctatgatccagatgtcaggatcattgagaatcacggtgtggaggacgaacttccaaattattgcttcccattggatggtaccggtaccaatgccacataccaaggtgtggaaccagataatgctcaaggtcaaaatgataaatggaaaaaggacgagaaagtggctgctcaaaaccaaatttgcaagggcaatatttatgccatggagattaacctccaggccaacctgtggaagagttttctgtactcgaacgtggccttgtacctgcccgactccttcaagtacacgccggccaacgtcacgctgcccactaacaccaacacctacgagtacatgaacgggcgcgtggcggccccctcgctggtggacgcctacgtcaacattggcgcccgctggtcactggaccccatggacaacgttaacccctttaaccaccaccgcaatgcgggcctgcgctaccgctccatgctgctgggcaacgggcgctacgtgcccttccatattcaagtgccccaaaagttttttgccattaagaacctgcttctgctcccgggctcctacacctacgagtggaacttccgcaaggatgttaacatgattctgcagagttcccttggcaacgacctgcgcgtcgacggtgcctccgtccgcttcgacagtgttaacctttacgccacctttttccccatggcgcacaacaccgcctccaccctggaagccatgctgcgcaacgacaccaacgaccagtccttcaacgactacctctcagccgccaacatgctttaccccatcccagccaaggccaccaacgtgcccatttccatcccctcgcgcaactgggccgcctttcgcggctggagtttcacccgcctaaaaaccaaggaaactccctccctcggctcgggttttgacccctactttgtttactcgggcaccatcccctacctcgacgggaccttctacctgaaccacacctttaagaaggtctccatcatgttcgactcctcggttagctggcccggcaacgacaggctgcttacgccgaacgagtttgaaattaagcgcagcgtcgacggggagggctataacgtggcccaatgcaacatgaccaaggactggttcctggtccagatgctttcccactacaacattggctaccagggcttccatgtgcctgagggctacaaggaccgcatgtactccttctttcgcaacttccagcccatgagtaggcaggtggttgatgagattaactacaaggattacaaggccgttgccctgcccttccagcacaacaactcgggcttcaccggctacctcgcacctaccttgcgccagggacagccgtaccccgccaacttcccctacccgcttatcggacagaccgccgtgccctccgttacccagaaaaagtttctctgcgacagggtcatgtggcgcatccccttctccagcaacttcatgtctatgggcgcccttaccgacctgggtcaaaacatgctttacgccaactcggcgcacgcgctcgacatgacctttgaggtggaccccatggatgagcccaccctcctgtatcttctctttgaagttttcgacgtggtcagagtgcaccagccgcaccgcggcgtcatcgaggccgtctacctgcgcacgcccttctccgccggcaacgccaccacctaagcatgagcggctccagcgaacaagagcttgcggccatcgtgcgcgacctgggctgcgggccctactttttgggcacccacgacaagcgcttcccgggcttccttgccggcaacaagctggcatgcgccatcgtcaacacggccggccgcgaaaccgggggcgtgcactggcttgcctttggctggaacccgcgctcgcgcacctgctacatgtttgacccctttgggttctcggaccgccggcttaagcagatttacagcttcgagtacgaggccatgttgcgtcgcagtgccctggccttatcgcccgaccgctgtcttagcctcgagcagtccacccagaccgtgcaggggcccgactccgccgcctgcggactcttttgttgcatgttcttgcatgcctttgtgcactggcccgatcgacccatggacgggaaccccaccatgaacttgctgacgggggtgcccaatggcatgctacaatcgccacaggtactgcccaccctccggcgcaaccaggagaagctctaccgcttccttgcgcaccactccccctactttcgctcccaccgcgccgccatcgaacacgccaccgcttttgataaaatgaaacaactgcgtgtataactcaaataaacagcacttttattttacatgcactggagtatatgcaagttatttaaaagtcaaaggggttctcgcgctcgtcgttgtgcgccgcgctgggaagggccacgttgcggtactggtacttgggctgccacttaaactcggggatcaccagtttaggaacagcaatctcggggaaggtctcgctccacatgcgccggctcatttgcagggcgcccagcatgtccggggcggagatcttaaaatcgcagttgggaccggtgctttgcgcgcgcgagttgcggtacacagggttgcagcactggaacaccatcagactggggtactttacgctggccagcacgctcttatcgctaatttgatccttgtccaggtcctcggcgttgctcaggccgaacggggtcatcttacacagctggcggcccaggaagggcacgctgtggggcttgtggttacactcgcagtgcacgggcattagcatcattcccgcaccgcgctgcatattcgggtatagggccttaacaaaggccataatctgcttaaaagcttgctgggccttagctccctcgctaaaaaacaggccgcagcttttcccgctaaactggttatttccgcacccggcatcttgcacgcagcagcgcgcgtcatggctggtcagttgcaccacgcttctcccccagcggttctgggtcactttggccttgctgggttgctccttcaacgcgcgctgaccgttctcgctggtcacatccatctccaccacatggtccttgtggatcattaccgtcccgtgcagacacttaagctggccttccacctcggcacagccgtggtcccacagggcactgccggtgcactcccagtttttgtgcgcgatcccgctgtggctaaagatgtaaccttgcaacaggcgacccatcacggtgctaaagctcttctgggtggtaaaggtcagttgcatcccgcgggcctcctcgttcatccaggtctggcacattttttggaatatctcggtctgctccggcataagcttgtaagcattgcgcaggccgctgtcgacgcggtagcgttccatgagcacgtttatggtatccatgcccttctcccaggacgaaaccaaaggcagactcagggggttgcgcacgttcaaaataccaggggtcgcgggctcgacaatgcgttttccgtccttgccttccttcaacagaaccggcggctggctgaatcccactcccacgatcacggcatcttcctggggcatctcttcgtcggggtttaccttggtcacatgtttggtctttctgggctgcttcttttttggagggctgtccactggaaccacgtcctcctcggaagacccggagcccacccgctgatactttcggcgcttggtgggcagaggaggtagcggcggcgaggggctcctttcctgctccggcggatagcgcgccgacccgtggccccggggcggagtggcctctcggtccataaaccggcgcacgtcctgactgccgccggccattgtttcctaggggaagatggaggagcagccgcgtaagcaggagcaggaggaggagaacttaaccacccacgagcaacccaaaattgagcaggacctgggcttggaagagccggctcgtctagaacccccacacgatgaacaggagaagaccaacgctgggctggagcatggctacctaggaggacaggaggatgtgctgctaaaacacttgcagcgccagtcctttatcctccgggacgctctggccgaccgaagcaaaacccccctcagcgtccaggagctgtgtcgggcctacgagctcaacctcttctcgccgcgcgtgccccccaaacgccagcccaacggcacctgcgagcccaacccgcgtcttaacttctaccccgtctttgcggtccccgaggcccttgccacttatcacatattttttaaaaaccaaaaaatccccgtttcctgccgcgccaaccgcacccgcgccgacgcactcctcgctctggggcccggcgcgcgcatacctgatatcgcttccctggaagaggtgcccaagatctttgaagggcttggtcgggacgagacgcgcgcggcgaacgctctaaaagaaacagcagaggaaaagggttacactagcgccctggtagagttggaaggcgataacgccaggctggccgtgcttaagcgcagcgtcgagcttacccatttcgcctaccctgccgttaacctcccgcccaaggtcatgcgtcgcatcatggatcagcttatcacgccccacattgaggcccttgatgaaagccaaaagcagcgccctgaggacgcccggcccgtggtcagcgacgaaatgcttgcgcgctggctcggaaaccgcgacccccagtccctggagcagcggcgtaagctcatgctggccgtggtcctggtcaccctcgagttggaatgcatgcgccgcttttttagcgaccccgaaaccctgcgcaaggttgaagagaccctgcactacactttcaggcacggctttgtcaggcaggcctgcaagatctctaacgtggagctaaccaacctggtctcctgcctgggtattttacacgagaaccgcctggggcagaccgtgcttcactcgaccctgaagggcgaggcgcggcgggactacatccgcgactgtgtctttctttttctttgccatacctggcagtcggccatgggcgtgtggcagcagtgtctccaggacgagaacctgaaggagctggacaagcttcttgctaaaaaccttaaaaagttatggacgggctttgacgagcgcaccgtcgcctcggacctggccgagattgtttttcctgaacgcctgaggcagacgcttaaaggcgggctgcccgactttatgagccagagcatgttgcaaaactaccgcactttcattctcgagcgatcgggaatcctgcccgccacctgcaacgccttcccctccgactttgtcccgctgagctaccgccagtgtcccccgccgctgtggagccactgctacctcttgcagctggccaactacatcgcccaccactcggacgtgatcgaggacgtaagcggcgaggggctgcttgagtgccactgccgctgcaacctgtgctccccgcaccgctccctggtctgcaacccccagctcctaagcgagacccaggtcatcggtacctttgagctgcaaggtccggaaaactccaccactccgctgaaacttacgccggggttgtggacttccgcgtacctgcgcaaatttgtaccccaggactaccacgcccacgagataaagttctttgaggaccaattgtgcccacagcacgcggatcttacggcctgcgtcatcacccagggcgcaatcctcgcccaattgcacgccatccaaaaatcccgccaagagtttcttctaaaaaagggtaaaggggtttacctggacccccagacaggcgaagtgcttaacccgggtcttccccagcatgccgaggaagaagcaggagccactagtggaggagatggaagaagaatgggacagccaggcagaggaggacgaatgggaggaggaggaggaagaattggaagaggtgcaacaggagcaggcaacagagcagcccgtcgccgcaccatccgcgccggcagcccctccggtcaagcctcctcgtagatgggatcaagtgaagggtgacggtaagcaccagcggcagggctaccgatcatggagggcccacaaagccgcgatcattgcctgcttgcaagactgcggggggaacattgcttttgcccgccgctacctgcttttccaccgcggggtaaacatcccccgcaacgtgttgcattactaccgtcaccttcacagctaacaaaaagcaagtaagaggagtcgccggaagaggaggcctcaggattgcggcggacgagcccttcaccaccagggagctaagaaaccgaatattccccactctttatgccatttttcagcagagtcgaggtcagcagcaagagcttaaagtaaaaaatcggtctctgcgctcgctcacccgcagttgcttgtaccacaaaaacgaagatcagctgcagcgcactcttgaagacgccgaggctttgtttcacaagtactgcgcgctcactcttaaagactaaggcgcgcccacccgaaaaaaaggcgggaattacctcatcgccagcaccatgagcaaggagattcccacgccttacatgtggagctatcagccccagatgggcctagccgcgggcgcctcccaggactactccacccgcatgaactggctcagtgccgggccctcaatgatctcacaggtcaacgggatccgtaaccatcgaaaccagatattgttggagcaggcggcagtcacctccacgcccagggcaaagcttaacccgcgtaattggccctccaccctggtgtaccaggaaattcccgggccaactaccgtactacttccgcgtgacgcactggccgaagtccgcatgactaactcaggtgtccagctggccggcggcgcttcccggtgcccgctccgcccacaatcgggtataaaaaccctggtgatccgaggcaaaggcacacagcttaacgacgagttggtaagctctgcaatcggtctgcgacctgatggagtgtttcaactagccggagccgggaaatcgtcctttactcccaaccaggcctacctgaccttgcagagcagctcttcggagcctcgctccggaggcattggaaccctccagtttgtgcaggagtttgtgccctcggtctactttaaccccttctcgggatcgccaggcctttacccggacgagtttataccgaactttgacgcagtgagagaagcggtggacggctacgactaaatgtcctatggtgactcggctgagcttgctcggttaaggcatctggaccactgccgccgcctgcactgctttgcccgggagagctgcgggcttatctactttgagcttcccaaggagcaccccaacggccctgcacacggagtgcggattaccgtagagggcaccaccgagtctcacctggttaggttcttcacccagcaacccttcctggtcgagcgggaccgggctgcaaccacctacaccgtgtactgcatttgtccaaccccgaagttgcatgaaaatttttgctgtactctttgtggtgagtttaataaaagctgaaataagactctactctggaatccagtgtcgtcataatcgcaccgagaccattaactttaccacccaggaacaggtgaactttacctgcaaactccacaagaagtacctcatatggtttttcaacaacactactcttgcagtagttaacacctgtgacaacgacggtgttcttcttcccaacaatctcaccagtggactagccttctctgttaaaagggcaaagctaattcttcattgccctataactgatttaagcccaaaaaccaatcaaacccccttttcccatctacccaaataaacatttattggaaataattattcaataaagatcacttacttaaaatctgaaagtatgtctttggtgtagttgtttagcagcacctcagtcccctcctcccagctctggtactccagtccccggcgggcggcaaactttctccacaccttgaaagggatgtcaaattcctggtccacaattttcattgtcttccctcttagatgacaaagagactccgggtggaagatgacttcaaccccgtctacccctatggctacgcgcggaatcaaaatattcccttcctcactcccccctttgtctcctccaatggatttcaaaacttcccccctggggtcctgtcacttaaactggctgacccaatcaccattaacaatcaaaatgtatcactcaaggttggaggggggctaactttgcaagaagaaactggaaaattaacagttaatactgaaccacctttgcatcttacaaataacaaattagggatagctttagacgctccatttgatgttatagacaataagcttacactattagcaggccatggcttgtctattataacaaaagaaacatcaacactgcctggcttggttaatactcttgtagtattaactggaaagggtattggaacagatttatcaaataatggtggaaatatatgtgttagagttggagaaggcggcggcttatcatttaatgacaatggagacttggtagcatttaataaaaaagaagacaaacgcaccctatggacaactccagacacatctccaaattgcagaattgatcaggataaggactctaagctaactttggtccttacaaagtgtggaagtcaaatattagccaatgtgtcattaattgttgtagctggaaggtacaaaattatcaataacaatactaatccagctcttaaaggatttaccattaaattgttgtttgataaaaatggagtccttatggaatcttcaaatcttggtaaatcatattggaactttcgaaatcaaaattcaattatgtcaacagcttatgaaaaagctattggttttatgcctaatttggtagcctatccaaaacctaccactggctctaaaaaatatgcaagagatatagtttatggaaacatctaccttggcggaaagccacatcaaccagtaaccattaaaactacctttaaccaggaaactggatgtgaatactctattacatttgattttagttgggccaaaacttatgtaaatgttgaatttgaaactacctcttttaccttttcctatattgcccaagaataaaggataaataaacgtgtttttcatttaaaaatttcatgtatctttattgatttttacaccagcgcgggtacacattctcccaccaccagcccattttacagtgtaaacaattctctcagcacgggtggccttaaataggggaaagttctcattagtgcgggaactggacttggggtttataatccacacagtttcctggcgagccaaacgggggtcggtgattgagatgaagccgtcctttgaaaaatcatccaagtgggcctcgcagtccaaggtcacagtctggtggaatgagaagaacgcacagactcatactcggaaaacaaaatgggtctgtgcctctccatcagcgcccttaacagtctctgccgccggggctcggtgcggctgctacagatgggatcgggatcgcaagtctctttcactataatccccacagcctttagcattagtcttctggtgcgtcgggcacagcaccgcatcctaatctcgctcatgttttcacagtaagtgcagcacataatgaccatgttattcagcagcccataatttagggtgctccagccaaagcttatgttggaaatgatggaacccacgtgaccatcgtaccaaatgcggcagtatatcaggtgcctgccccttataaacacactgcccatatacataatctctttggacatgtttctatttacaatctgccggtaccaggggaagcgctggttgaacatgcacccgtaaatgactctcctaaaccacacggccagcagggtgcctcccgcccggcactgcagggagcccggggataaacagtggcaatgcaggatccagcgctcgtacccgcttaccatctgggctcttaccagatccagggtagcgggacacaggcacactgacatacatctttttaaaatttttatttcctttcgggtcaggatcatatcccaggggactggaaactcttggagcagggtaaaaccagcagcacatggtaatccacggacagaacttacattatgataatctgcatgatcacaatcgggcaatacagggtgttgttcagtcaaagaggccctggtctccttatcatatcgtggtaaacgggccctgcgatatggataatggcggagcaaggttgattgttccttggtgctcattgtagcgcaccctcttgcgtacctcgttgtacttttgccagcagaaagtggccctggaacagcaaatacctctcctccgaccgtcctttcgctgttgccgctcagtcatccaactgaagtacatccattcccaaaggttgtgaagaagttcctttgtatctaatgaaacaaaaagcccgtccatgcggattcccctcatcacatcagccaggactctgtaggccatccccatccagttaatgctgccttgtctatcatttaaagggggcggtggcaaaattggaagaaccatttttattccaaacggtctcgaaggacgataaagtgcaagtcacgcaggtgacagcgttcaccgccgctgtgttggtggaaacatacagccaggtcaaaacccactctattttcaaggtgctcgactgtggcttcgagcagtggctctacgcgtacatccagcataagaatcacattaaaagccggccctccatcgatttcatcaatcatcatgttacattcctgcaccatccccaggtaattctcatttttccagccttggattatttctacaaattgttggtgtaagtccactccgcacatgtggaaaagctcccatagcgccccctccactttcataatcaggcagaccttcataatagaaacaaatcctgctgctccaccacctgcagcgtgtttaaaacaacaacatttaataaggttctgccctcagcccttagctgacgtctaagtgtcagctgcaaaaagtcacttaagtcctgggccactacagctgacaattcagagccagggctaagcgtgggactggcaagcgtaagggagtactttaatgctccaaagctagcacctaaaaactgcatgctggaataagctctttttgtatctccggtaatgccttccaaaatgtgagtaataaagcgaggtagtttttctttaatcatgttagtaatagaaaaatcctctaaatacgtcactaggaccccagggaccacaatgtggtagcttacaccgcgtcgctgaagcatggttagtagagatgaaagtctgaaaaacaaaaagcatgcgctaaaccaaggtggctatttttactgaaggaaaaattactttttttagcagcagggtgcccactgggtggcccttgcggacatacaaaaattggtccgtgtgattaaaaagcagtacagcaagctcctgtcttctcccggcaaaaatcacatcggactgggttagtatgcccctggcatggtagtcatttaaagccataaatgtgccctgataaccagtaggaacgagtacactgacttttaggtaaaccaataccaccccatgcggaaaaatataaaaagattcaggacaaaaaaaggtatatttattgctagccccttcctggacgggagccatccctccagggctatctataaaagcatagagacattcagccatagcttagcccgcttaccagtagacaaagagcacagcagtacaagcgccaacagcaataactacttactgtgccagctcagtacttaaaggcagcttacactgacgtaatgaccaaaggtgtaaaaaccccgccaaaaaaaaacacacacgccctaggtgtttttcgtaaaaacacttccgcgttctcacttcctcgtatcaattttgtgacttaacttccgggttcccacgttacgtcacttttgcccttacatgtgactgtgccatagggcgccattttcccgtgcccaatatggctaaagtccgcttttttatacgtcatcggccccgcgacttgcttccgggttgggccacgcctttgcggcaaccgccggccgtacgtcttgacgtcaactgcattaccgcttgttaaccacttaacgttggccctgccctaaaaccgttaaaatttaaaagctcatttgcatattaacttttgtttactttgtggggtatattattgatgatg

SEQ ID NO: 1415 - DNA, 37177 bp, Adenovirus D17
  MISC_FEATURE (1)..(37177): Adenovirus D17 variant
atggagaaaaaaatcactggatataccaccgttgatatatcccaatggcatcgtaaagaacattttgaggcatttcagtcagttgctcaatgtacctataaccagaccgttcagctggatattacggcctttttaaagaccgtaaagaaaaataagcacaagttttatccggcctttattcacattcttgcccgcctgatgaatgctcatccggaattccgtatggcaatgaaagacggtgagctggtgatatgggatagtgttcacccttgttacaccgttttccatgagcaaactgaaacgttttcatcgctctggagtgaataccacgacgatttccggcagtttctacacatatattcgcaagatgtggcgtgttacggtgaaaacctggcctatttccctaaagggtttattgagaatatgtttttcgtctcagccaatccctgggtgagtttcaccagttttgatttaaacgtggccaatatggacaacttcttcgcccccgttttcaccatgggcaaatattatacgcaaggcgacaaggtgctgatgccgctggcgattcaggttcatcatgccgtctgtgatggcttccatgtcggcagaatgcttaatgaattacaacagtactgcgatgagtggcagggcggggcgtaacatatgcatcatcaataatataccccacaaagtaaacaaaagttaatatgcaaatgaggttttaaatttagggcggggctactgctgattggccgagaaacgttgatgcaaatgacgtcacgacgcacggctaacggtcgccgcggaggcgtggcctagcccggaagcaagtcgcggggctgatgacgtataaaaaagcggactttaaacccggaaacggccgattttcccgcggccacgcccggatatgaggtaattctgggcggatgcaagtgaaattaggtcattttggcgcgaaaactgaatgaggaagtgaaaagtgaaaaataccggtcccgcccagggcggaatatttaccgagggccgagagactttgaccgattacgtgtgggtttcgattgcggtgttttttcgcgaatttccgcgtccgtgtcaaagtccggtgtttatgtcacagatcagctgatccacagggtatttaaaccagtcgagcccgtcaagaggccactcttgagtgccagcgagtagagatttctctgagctccgctcccagagtgtgagaaaaatgagacacctgcgcctcctgcctggaactgtgcccttggacatggccgcattattgctggatgactttgtgagtacagtattggaggatgaactgcaaccaactccgttcgagctgggacccacacttcaggacctctatgatttggaggtagatgcccaggaggacgacccgaacgaagatgctgtgaatttaatatttccagaatctctgattcttcaggctgacatagccagcgaagctctacctactccacttcatactccaactctgtcacccatacctgaattggaagaggaggacgagttagacctccggtgttatgaggaaggttttcctcccagcgattcagaggacgaacagggtgagcagagcatggctctaatctcagactatgcttgtgtggttgtggaagagcattttgtgttggacaatcctgaggtgcccgggcaaggctgtaaatcctgccagtaccaccgggataagaccggagacacgaacgcctcctgtgctctgtgttacatgaaaaagaacttcagctttatttacagtaagtggagtgaatgtgagagaggctgagtgcttaagacataactgggtgatgcttcaacagctgtgctaagtgtggtttattttgtttctaggtccggtgtcagaggatgagtcatcaccctcagaagaagaccacccgtgtccccctgagctgtcaggcgaaacgcccctgcaagtgcacagacccaccccagtcagacccagtggcgagaggcgagcagctgttgaaaaaattgaggacttgttacatgacatgggtggggatgaacctttggacctgagcttgaaacgtcccaggaactaggcgcagctgcgcttagtcatgtgtaaataaagttgtacaataaaaattatatgtgacgcatgcaaggtgtggtttatgactcatgggcggggcttagttctatataagtggcaacacctgggcactggagcacagaccttcagggagttcctgatggatgtgtggactatccttgcagactttagcaagacacgccggcttgtagaggatagttcagacgggtgctccgggttctggagacactggtttggaactcctctatctcgcctggtgtacacagttaaaaaggattataacgaggaatttgaaaatctttttgctgattgctctggcctgctagattctctgaatctcggccaccagtcccttttccaggaaagggtactccacagccttgatttttccagcccagggcgcactacagccggggttgcttttgtggtttttctggttgacaaatggagccagaacacccaactgagcaggggctacattctggacttcgcagccatgcacctgtggagggcatgggtcaggcagcggggacagagaatcttgaactactggcttctacagccagcagctccgggtcttcttcgtctacacagacaaacatccatgttggaggaagaaatgaggcaggccatggacgagaacccgaggagcggtctggaccctccgtcggaagaggagttggattgaatcaggtatccagcctgtacccagagcttagcaaggtgctgacatccatggccaggggagtgaagagggagaggagcgatgggggcaataccgggatgatgaccgagctgacggccagtctgatgaatcgcaagcgcccagagcgccttacctggtacgagctacagcaggagtgcagggatgagttgggcctgatgcaggataaatatggcctggagcagataaaaacccattggttgaacccagatgaggattgggaggaggctattaagaagtatgccaagatagccctgcgcccagattgcaagtacatagtgaccaagaccgtgaatatcagacatgcctgctacatctcggggaacggggcagaggtggtcattgataccctggacaaggccgcctttaggtgttgcatgatgggaatgagagccggagtgatgaatatgaattccatgatctttatgaacatgaagttcaatggagagaagtttaatggggtgctgttcatggccaacagccacatgaccctgcatggctgcgactttttcggctttaacaatatgtgcgcagaggtctggggcgcttccaagatcaggggatgtaagttttatggctgctggatgggcgtggtcggaagacccaagagcgagatgtctgtgaagcagtgtgtgtttgagaaatgctacctgggagtctctaccgagggcaatgctagagtgaggcactgctcttccctggagacgggctgcttctgcctggtgaagggcacagcctctctgaagcataatatggtgaagggctgcacggatgagcgcatgtacaacatgctgacctgcgactcgggggtctgtcatatcctgaagaacatccatgtgacctcccaccccagaaagaagtggccagtgtttgagaataacatgctgatcaagtgccacatgcacctgggcgccagaaggggcaccttccagccgtaccagtgcaactttagccagaccaagctgctgttggagaacgatgccttctccagggtgaacctgaacggcatctttgacatggatgtctcggtgtacaagatcctgagatacgatgagaccaagtccagggtgcgcgcttgcgagtgcgggggcagacacaccaggatgcagccagtggccctggatgtgaccgaggagctgagaccagaccacctggtgatggcctgtaccgggaccgagttcagctccagtggggaggacacagattagaggtaggtttgagtagtgggcgtggctaaggtgactataaaggcgggtgtcttacgagggtctttttgcttttctgcagacatcatgaacgggaccggcggggccttcgaaggggggctttttagcccttatttgacaacccgcctgccaggatgggccggagttcgtcagaatgtgatgggatcgacggtggacgggcgcccagtgcttccagcaaattcctcgaccatgacctacgcgaccgtggggaactcgtcgcttgacagcaccgccgcagccgcggcagccgcagccgccatgacagcgacgagactggcctcgagctacatgcccagcagcagcagtagcccctctgtgcccagttccatcatcgccgaggagaaactgctggccctgctggccgagctggaagccctgagccgccagctggccgccctgacccagcaggtgtccgagctccgcgaacagcagcagcaaaataaatgattcaataaacacatattctgattcaaacagcaaagcatctttattatttattttttcgcgcgcggtaggccctggtccacctctcccgatcattgagagtgcggtggattttttccaagacccggtagaggtgggattggatgttgaggtacatgggcatgagcccgtcccgggggtggaggtagcaccactgcatggcctcgtgctctggggtcgtgttgtagatgatccagtcatagcaggggcgctgggcgtggtgctggatgatgtccttgaggaggagactgatggccacggggagccccttggtgtaggtgttggcaaagcggttgagctgggagggatgcatgcggggggagatgatgtgcagtttggcctggatcttgaggttggcgatgttgccacccagatcccgccgggggttcatgttgtgcaggaccaccaggacggtgtagcccgtgcacttggggaacttatcatgcaacttggaagggaatgcgtggaagaatttggagacgcccttgtgcccgcccaggttttccatgcactcatccatgatgatggcgatgggcccgtgggctgcggctttggcaaagacgtttctggggtcagagacatcataattatgctcctgggtgagatcatcataagacattttaatgaattttgggcggagggtgccagattgggggacgatggttccctcgggccccggggcgaagttcccctcgcagatctgcatctcccaggctttcatctcggagggggggatcatgtccacctgcggggcgatgaaaaaaacggtttccggggcgggggtgatgagctgcgaggagagcaggtttctcaacagctgggacttgccgcacccggtcgggccgtagatgaccccgatgacgggttgcaggtggtagttcaaggacatgcagctgccgtcgtcccggaggaggggggccacctcgttgagcatgtctctaacttggaggttttcccggacgagctcgccgaggaggcggtccccgcccagcgagaggagctcttgcagggaagcaaagtttttcaggggcttgagtccgtcggccatgggcatcttggcgagggtctgcgagaggagttcgagacggtcccagagctcggtgacgtgctctacggcatctcgatccagcagacttcctcgtttcgggggttgggacgactgcgactgtagggcacgagacgatgggcgtccagcgcggccagcgtcatgtccttccagggtctcagggtccgcgtgagggtggtctccgtcacggtgaaggggtgggcccctggctgggcgcttgcaagggtgcgcttgagactcatcctgctggtgctgaaacgggcacggtcttcgccctgcgcgtcggcgagatagcagttgaccatgagctcgtagttgagggcctcggcggcgtggcccttggcgcggagcttgcccttggaagagcgtccgcaggcgggacagaggagggattgcagggcgtagagcttgggcgcaagaaagaccgactcgggagcaaaagcgtccgctccgcagtgggcgcagacggtctcgcactcgacgagccaggtgagctcgggctgctcggggtcaaaaaccagttttcccccgttctttttgatgcgcttcttacctcgcgtctccatgagtctgtgtccgcgctcggtgacaaacaggctgtcggtgtccccgtagacggacttgattggcctgtcctgcaggggcgtcccgcggtcctcctcgtagagaaactcggaccactctgagacaaaggcgcgcgtccacgccaagacaaaggaggccacgtgcgaggggtagcggtcgttgtccaccagggggtccaccttttccaccgtgtgcagacacatgtccccctcctccgcatccaagaaggtgattggcttgtaggtgtaggccacgtgaccaggggtccccgacgggggggtataaaagggggcgggtctgtgctcgtcctcactctcttccgcgtcgctgtccacgagcgccagctgttggggtaggtattccctctcgagagcgggcatgacctcggcactcaggttgtcagtttctagaaacgaggaggatttgatgttggcttgccctgccgcaatgctttttaggagactttcatccatctggtcagaaaagactatttttttattgtcaagcttggtggcaaaggagccatagagggcgttggagagaagcttggcgatggatctcatggtctgatttttgtcacggtcggcgcgctccttggccgcgatgttgagctggacatattcgcgcgcgacacacttccattcgggaaagacggtggtgcgctcgtcgggcacgatcctgacgcgccagccgcggttatgcagggtgaccaggtccacgctggtggccacctcgccgcgcaggggctcgttagtccagcagagtctgccgcccttgcgcgagcagaacgggggcagcacatcaagcagatgctcgtcaggggggtccgcatcgatggtgaagatgccgggacagagtttcttgtcaaaatagtctatttttgaggatgcatcatccaaggccatctgccactcgcgggcggccattgctcgctcgtaggggttgaggggcggaccccagggcatgggatgcgtgagggcggaggcgtacatgccgcaaatgtcgtagacatagatgggctccgagaggatgccgatgtaggtgggataacagcgccccccgcggatgctggcgcgcacgtagtcatacaactcgtgcgagggggccaagaaggcggggccgagattggtgcgctggggctgctcggcgcggaagacaatctggcgaaagatggcgtgcgagttggaggagatggtgggccgttggaagatgttaaagtgggcgtggggcaagcggaccgagtcgcggatgaagtgcgcgtaggagtcttgcagcttggcgacgagctcggcggtgacgaggacgtccatggcgcagtagtccagcgtttcgcggatgatgtcataacccgcctctcctttcttctcccacagctcgcggttgagggcgtattcctcgtcatccttccagtactcccggagcgggaatcctcgatcgtccgcacggtaagagcccagcatgtagaaatggttcacggccttgtagggacagcagcccttctccacggggagggcgtaagcttgtgcggccttgcggagcgaggtgtgcgtcagggcgaaggtgtccctgaccatgactttcaagaactggtacttgaaatccgagtcgtcgcagccgccgtgctcccatagctcgaaatcggtgcgcttcttcgagagggggttaggcagagcgaaagtgacgtcattgaagagaatcttgcctgctcgcggcatgaaattgcgggtgatgcggaaagggcccgggacggaggctcggttgttgatgacctgggcggcgaggacgatctcgtcgaagccgttgatgttgtgcccgacgatgtagagttccatgaatcgcgggcggcctttgatgtgcggcagctttttgagctcctcgtaggtgaggtcctcggggcattgcaggccgtgctgctcgagcgcccattcctggagatgtgggttggcttgcatgaaggaagcccagagctcgcgggccatgagggtctggagctcgtcgcgaaagaggcggaactgctggcccacggccatcttttcgggtgtgacgcagtagaaggtgagggggtcccgctcccagcgatcccagcgtaagcgcgcggctagatcgcgagcaagggcgaccagctctgggtcccccgagaatttcatgaccagcatgaaggggacgagctgcttgccgaaggaccccatccaggtgtaggtttctacatcgtaggtgacaaagagccgctccgtgcgaggatgagagccgattgggaagaactggatttcctgccaccagttggacgagtggctgttgatgtgatgaaagtagaaatcccgccggcgaaccgagcactcgtgctgatgcttgtaaaagcgtccgcagtactcgcagcgctgcacgggctgtacctcatccacgagatacacagcgcgtcccttgaggaggaacttcaggagtggcggccctggctggtggttttcatgttcgcctgcgtgggactcaccctggggctcctcgaggacggagaggctgacgagcccgcgcgggagccaggtccagatctcggcgcggcgggggcggagagcgaagacgagggcgcgcagttgggagctgtccatggtgtcgcggagatccaggtccgggggcagggttctgaggttgacctcgtagaggcgggtgagggcgtgcttgagatgcagatggtacttgatttctacgggtgagttggtggccgtgtccacgcattgcatgagcccgtagctgcgcggggccacgaccgtgccgcggtgcgcttttagaagcggtgtcgcggacgcgctcccggcggcagcggcggttccggccccgcgggcaggggcggcagaggcacgtcggcgtggcgctcgggcaggtcccggtgttgcgccctgagagcgctggcgtgcgcgacgacgcggcggttgacatcctggatctgccgcctctgcgtgaagaccactggccccgtgactttgaacctgaaagacagttcaacagaatcaatctcggcgtcattgacggcggcctgacgcaggatctcttgcacgtcgcccgagttgtcctggtaggcgatctcggacatgaactgctcgatctcctcctcctggagatcgccgcgacccgcgcgctccacggtggcggcgaggtcattcgagatgcgacccatgagctgcgagaaggcgcccaggccgctctcgttccagacgcggctgtagaccacgtccccgtcggcgtcgcgcgcgcgcatgaccacctgcgcgaggttgagctccacgtgccgcgcgaagacggcgtagttgcgcaggcgctggaagaggtagttgagggtggtggcgatgtgctcggtgacgaagaagtacatgatccagcggcgcaggggcatctcgctgatgtcgccgatggcctccagcctttccatggcctcgtagaaatccacggcgaagttgaaaaactgggcgttgcgggccgagaccgtgagctcgtcttccaggagcctgatgagctcggcgatggtggcgcgcacctcgcgctcgaaatccccgggggcctcgtcctcttcctcttcttccatgacaacctcttctatttcttcctctgggggcggtggtggtggcggggcccgacgacgacggcgacgcaccgggagacggtcgacgaagcgctcgatcatctccccgcggcggcgacgcatggtttcggtgacggcgcgaccccgttcgcgaggacgcagcgtgaagacgccgccggtcatctcccggtaatggggcgggtccccgttgggcagcgagagggcgctgacgatgcatcttatcaattgcggtgtaggggacgtgagcgcgtcgagatcgaccggatcggagaatctttcgaggaaagcgtctagccaatcgcagtcgcaaggtaagctcaaacacgtagcagccctgtggacgctgttagaattgcggttgctaatgatgtaattgaagtaggcgtttttgaggcggcggatggtggcgaggaggaccaggtccttgggtcccgcttgctggatgcggagccgctcggccatgccccaggcctggccctgacaccggcttaggttcttgtagtagtcatgcatgagcctctcgatgtcatcactggcggaggcggagtcttccatgcgggtgaccccgacgcccctgagcggctgcacgagcgccaggtcggcgacgacgcgctcggcgaggatggcctgttgcacgcgggtgagggtgtcctggaagtcgtccatgtcgacgaagcggtggtaggcccctgtgttgatggtgtaagtgcagttggccatgagcgaccagttgacggtctgcaggccgggctgcacgacctcggagtacctgagccgcgagaaggcgcgcgagtcgaagacgtagtcgttgcaggtgcgcacaaggtactggtatccgactaggaagtgcggcggcggctggcggtagagcggccagcgctgggtggccggcgcgcccggggccaggtcctcgagcatgaggcggtggtagccgtagaggtagcgggacatccaggtgatgccggcagcggtggtggaggcgcgcgggaactcgcggacgcggttccagatgttgcgcagcggcaggaaatagtccatggtcggcacggtctggccggtgagacgcgcgcagtcattgacgctctagaggcaaaaacgaaagcggttgagcgggctcttcctccgtagcctggcggaacgcaaacgggttaggccgcgcgtgtaccccggttcgagtcccctcgaatcaggctggagccgcgactaacgtggtattggcactcccgtctcgacccgagcccgatagccgccaggatacggcggagagccctttttgccggccgaggggagtcgctagacttgaaagcggccgaaaaccccgccgggtagtggctcgcgcccgtagtctggagaagcatcgccagggttgagtcgcggcagaacccggttcgcggacggccgcggcgagcgggacttggtcaccccgccgatttaaagacccacagccagccgacttctccagttacgggagcgagcccccttttttctttttgccagatgcatcccgtcctgcgccaaatgcgtcccacccccccggcgaccaccgcgaccgcggccgtagcaggcgccggcgctagccagccacagccacagacagagatggacttggaagagggcgaagggctggcgagactgggggcgccttccccggagcgacacccccgcgtgcagctgcagaaggacgtgcgcccggcgtacgtgcctgcgcaaaacctgttcagggaccgcagcggggaggagcccgaggagatgcgcgactgccggtttcgggcgggcagggagctgcgcgagggcctggaccgccagcgcgtgctgcgcgacgaggatttcgagccgaacgagcagacggggatcagccccgcgcgcgcgcacgtggcggcggccaacctggtgacggcctacgagcagacggtgaagcaggagcgcaacttccaaaagagtttcaacaaccatgtgcgcaccctgatcgcgcgcgaggaggtggccctgggcctgatgcacctgtgggacctggcggaggccatcgtgcagaacccggacagcaagcctctgacggcgcagctgttcctggtggtacagcacagcagggacaacgaggcgttcagggaggcgctgctaaacatcgccgagcccgagggtcgctggctgctggagctgatcaacatcttgcagagcatcgtagttcaggagcgcagcctgagcttggccgagaaggtggcggcaatcaactactcggtgcttagcctgggcaagttttacgcgcgcaagatttacaagacgccgtacgtgcccatagacaaggaggtgaagatagacagcttttacatgcgcatggcgctcaaggtgctgacgctgagcgacgacctgggcgtgtaccgcaacgaccgcatccacaaggccgtgagcgcgagccggcggcgcgagctgagcgaccgcgagctgatgctgagcctgcgccgggcgctggtagggggcgccgccggcggcgaggagtcctacttcgacatgggggcggacctgcattggcagccgagccggcgcgccttggaggccgcctacggtccagaggacttggatgaggaagaggaagaggaggaggatgcacccgctgcggggtactgacgcctccgtgatgtgtttttagatgcagcaagccccggaccccgccataagggcggcgctgcaaagccagccgtccggtctagcatcggacgactgggaggctgcgatgcaacgcatcatggccctgacgacccgcaaccccgagtcctttagacaacagccgcaggccaacagactctcggccattctggaggcggtggtcccctctcggaccaaccccacgcacgagaaggtgctggcgatcgtgaacgcgctggcggagaacaaggccatccgtcccgacgaggccgggctagtgtacaacgccctgctggagcgcgtaggccgctacaacagcacaaacgtgcagtccaacctggaccggctggtgacggacgtgcgcgaggccgtggcgcagcgcgagcggttcaagaacgagggcctgggctcgctggtggcgctgaacgccttcctggcgacgcagccggcgaacgtgccgcgcgggcaggatgattacaccaactttatcagcgcgctgcggctgatggtgaccgaggtgccccagagcgaggtgtaccagtcgggcccggactactttttccaaactagcagacagggcctgcaaacggtgaacctgagccaggctttcaagaacctgcgcgggctgtggggcgtgcaggcgcccgtgggcgaccggtcgacggtgagcagcttgctgacgcccaactcgcggctgctgctgctgctgatcgcgcccttcaccgacagtggcagcgtaaaccgcaactcgtacctgggtcacctgctaacgctgtaccgcgaggccataggccaggcgcaggtggacgagcagaccttccaggagatcactagcgtgagccgcgcgctggggcagaacgacaccgacagtctgagggccaccctgaacttcttgctgaccaatagacagcagaagatcccggcgcagtacgcgctgtcggccgaggaggagcgcatcctgagatatgtgcagcagagcgtagggcttttcctgatgcaggagggggccactcccagcgccgcgctggacatgaccgcgcgcaacatggaacctagcatgtacgccgccaaccggccgtttatcaataagctaatggactacctgcatcgcgcggcgtccatgaactcggactactttaccaatgccattttgaacccgcactggcttccgccgccggggttctatacgggcgagtacgacatgcccgaccccaacgacgggtttttgtgggacgacgtggacagcgcggtgttttcaccgaccttgcaaaagcgccaggaggcggtgcgcacgcccgcgagcgagggcgcggtgggtcggagcccctttcctagcttagggagtttgcatagcttgccgggctctgtgaacagcggcagggtgagccggccgcgcttgctgggcgaggacgagtacctgaacgactcgctgctgcagccgccgcgggtcaagaacgccatggccaataacgggatagagagtctggtggacaaactgaaccgctggaagacctacgctcaggaccatagggagcctgcgcccgcgccgcggcgacagcgccacgaccggcagcggggcctggtgtgggacgacgaggactcggccgacgatagcagcgtgttggacttgggcgggagcggtggggtcaacccgttcgcgcatctgcagcccaaactggggcgacggatgttttgaatgcaaaataaaactcaccaaggccatagcgtgcgttctcttccttgttagagatgaggcgtgcggtggtgtcttcctctcctcctccctcgtacgagagcgtgatggcgcaggcgaccctggaggttccgtttgtgcctccgcggtatatggctcctacggagggcagaaacagcattcgttactcggagctggctccgttgtacgacaccactcgcgtgtacttggtggacaacaagtcggcggacatcgcttccctgaactatcaaaacgaccacagcaacttcctgaccacggtggtgcagaacaacgatttcacccccgccgaggctagcacgcagacgataaattttgacgagcggtcgcggtggggcggtgatctgaagaccattctgcacaccaacatgcccaatgtgaacgagtacatgttcaccagcaagtttaaggcgcgggtgatggtggctagaaaacacccacagggggtagaagcaacagatttaagcaaggatatcttagagtatgagtggtttgagtttaccctgcccgagggcaacttttccgagaccatgaccatagacctgatgaacaacgccatcttggaaaactacttgcaagtggggcggcaaaatggcgtgctggagagcgatattggagtcaagtttgacagcagaaatttcaagctgggctgggaccctgtgaccaagctggtgatgccaggggtctacacctacgaggcctttcacccggacgtggtgctgctgccgggctgcggggtggacttcacagagagccgcctgagcaacctcctgggcattcgcaagaagcaacctttccaagagggcttcagaatcatgtatgaggatctagaagggggcaacatccccgccctgctggatgtgcccaagtacttggaaagcaagaagaagttagaggaggcattggagaatgctgctaaagctaatggtcctgcaagaggagacagtagcgtctcaagagaggttgaaaaggcagctgaaaaagaacttgttattgagcccatcaagcaagatgatagcaagagaagttacaacctcatcgagggaaccatggacacgctgtaccgcagctggtacctgtcctatacctacggggaccctgagaagggggtgcagtcgtggacgctgctcaccaccccggacgtcacctgcggcgcggagcaagtctactggtcgctgccggacctcatgcaagaccccgtcaccttccgttctacccagcaagtcagcaactaccccgtggtcggcgccgagctcatgcccttccgcgccaagagcttttacaacgacctcgccgtctactcccagctcatccgcagctacacctccctcacccacgtcttcaaccgcttccccgacaaccagatcctctgccgtccgcccgcgcccaccatcaccaccgtcagtgaaaacgtgcctgctctcacagatcacgggacgctaccgctgcgcagcagtatccgcggagtccagcgagtgaccgtcactgacgcccgtcgccgcacctgtccctacgtctacaaggccctgggcatagtcgcgccgcgtgtgctttccagtcgcaccttctaaaaaatgtctattctcatctcgcccagcaataacaccggctggggtattactaggcccagcagcatgtacggaggagccaagaaacgctcccagcagcaccccgtccgcgtccgcggccacttccgcgctccctggggcgcttacaagcgcgggcggactgccaccgccgccgccgtgcgcaccaccgtcgacgacgtcatcgactcggtggtcgccgacgcgcgcaactatactcccgccccctcgaccgtggacgcggtcattgacagcgtggtggccgacgcgcgcgactatgccagacgcaagagccggcggcgacggatcgccaggcgccatcggagcacgcccgccatgcgcgccgcccgagctctgctgcgccgcgccagacgcacgggccgccgggccatgatgcgagccgcgcgccgcgccgccactgcaccccccgcaggcaggactcgcagacgagcggccgccgccgccgccgcggccatctctagcatgaccagacccaggcgcggaaacgtgtactgggtgcgcgactccgtcacgggcgtgcgcgtgcccgtgcgcacccgtcctcctcgtccctgatctaatgcttgtgtcctcccccgcaagcgacgatgtcaaagcgcaaaatcaaggaggagatgctccaggtcgtcgccccggagatttacggaccaccccaggcggaccagaaaccccgcaaaatcaagcgggttaaaaaaaaggatgaggtggacgagggggcagtagagtttgtgcgcgagttcgctccgcggcggcgcgtaaattggaaggggcgcagggtgcagcgcgtgttgcggcccggcacggcggtggtgttcacgcccggcgagcggtcctcggtcaggagcaagcgtagctatgacgaggtgtacggcgacgacgacatcctggaccaggcggcagagcgggcgggcgagtttgcctacgggaagcggtcgcgcgaagaggagctgatctcgctgccgctggacgagagcaatcccacgccgagcctgaagcccgtgaccctgcagcaggtgctgccccaggcggtgctgctgccgagccgcgggatcaagcgcgagggcgagaacatgtacccgaccatgcagatcatggtgcccaagcgccggcgcgtggaggaagtgctggacaccgtgaaaatggatgtggagcccgaggtcaaggtgcgccccatcaagcaggtggcgccgggcctgggcgtgcagaccgtggacattcagatccccaccgacatggatgtcgacaaaaaaccctcgaccagcatcgaggtgcagaccgacccctggctcccagcctccaccgctaccgcttccacttctaccgtcgccacggtcaccgagcctcccaggaggcgaagatggggccccgccaaccggctgatgcccaactacgtgttgcatccttccattatcccgacgccgggctaccgcggcacccggtactacgccagccgcaggcgcccagccagcaaacgccgccgccgcaccgccacccgccgccgtctgccccccgcccgcgtgcgccgcgtaaccacgcgccggggccgctcgctcgttctgcccaccgtgcgctaccaccccagcatcctttaatccgtgtgctgtgatactgttgcagagagatggctctcacttgccgcctgcgcatccccgttccgaattaccgaggaagatcccgccgcaggagaggcatggcaggcagcggcctgaaccgccgccggcggcgggccatgcgcaggcgcctgagtggcggctttctgcccgcgctcatccccataatcgcggcggccatcggcacgatcccgggcatagcttccgttgcgctgcaggcgtcgcagcgccgttgatgtgcgaataaagcctctttagactctgacacacctggtcctgtatatttttagaatggaagacatcaattttgcgtccctggctccgcggcacggcacgcggccgttcatgggcacctggaacgagatcggcaccagccagctgaacgggggcgccttcaattggagcagtgtctggagcgggcttaaaaatttcggctcgacgctccggacctatgggaacaaggcctggaatagtagcacggggcagttgttgagggaaaagctcaaagaccagaacttccagcagaaggtggtggacggcctggcctcgggcattaacggggtggtggacatcgcgaaccaggcagtgcagcgcgagataaacagccgtctggacccgcggccgcccacggtggtggagatggaagatgcaactcttccgccgccgaagggcgagaagcggccgcggccagatgcggaggagacgatcctgcaggtggacgagccgccctcgtacgaggaggccgtgaaggccggcatgcccaccacgcgcatcatcgcgccactggccacgggtgtaatgaaacccgccacccttgacctgcctccaccacccacgcccgctccaccgaaggcagctccggttgtgcagccccctccggtggcgaccgccgtgcgccgcgtccccgcccgccgccaggcccagaactggcagagcacgctgcacagtattgtgggcctgggagtgaaaagtctgaagcgccgccgatgctattgagagagaggaaggaggacactaaagggagagcttaacttgtatgtgccttaccgccagagaacgcgcgaagatggccaccccctcgatgatgccgcagtgggcgtacatgcacatcgccgggcaggacgcctcggagtacctgagcccgggtctggtgcagtttgcccgcgccaccgacacgtacttcagcctgggcaacaagtttaggaaccccacggtggccccgacccacgatgtgaccacggaccggtcccagcgtctgacgctgcgctttgtgcccgtggatcgcgaggacaccacgtactcgtacaaggcgcgcttcactctggccgtgggcgacaaccgggtgctagacatggccagcacgtactttgacatccgcggcgtcctggaccgcggtcccagtttcaaaccctactcgggcacggcttacaacagccttgcccccaagggcgctcccaatcccagtcagtgggttgccaaagaaaatggtcagggaactgataagacacatacttatggctcagctgccatgggaggaagcaacatcaccattgaaggtttagtaattggaactgatgaaaaagctgaggatggcaaaaaagatatttttgcaaataaactttatcagccagaacctcaagtaggtgaagaaaactggcaagagtctgaagccttctatggaggcagagctcttaagaaagacacaaaaatgaagccctgctatggctcatttgcaagacctaccaatgaaaaaggcggacaagctaaatttaagccagtggaagaggggcagcaacctaaagattatgacatagatttggctttctttgacacacctggaggcaccatcacaggaggcacagacgaagaatataaagcagacattgtgttgtacactgaaaatgtcaaccttgaaaccccagacacccacgtggtatacaagccaggaaaagaggatgacagttcagaagtaaatttgacacagcagtccatgcccaacaggcctaactacattggcttcagagacaactttgtgggactcatgtactacaacagtactggcaacatgggtgtgctggctggtcaggcctctcaattgaatgctgtggtcgacttgcaagacagaaacaccgagctgtcttaccagctcttgctagattctctgggtgacagaaccagatacttcagcatgtggaactctgcggtggatagctatgatccagatgtcaggatcattgaaaatcatggtgtggaagatgaacttccaaactattgcttcccattgaatggcactggcaccaattcaacatatcttggcgtaaaggtgaaaccagatcaagatggtgatgttgaaagcgagtgggataaagatgataccattgcaaggcagaatcaaatcgccaagggcaacgtctttgccatggagatcaacctccaggccaacctgtggaagagttttctgtactcgaacgtggccttgtacctgcccgactcctacaagtacacgccggccaatgttacgctgcccgccaacaccaacacctacgagtacatgaacggccgcgtggtagccccctcgctggtggacgcctacatcaacataggcgcccgatggtcgctggaccccatggacaacgtcaaccccttcaaccaccaccgcaatgcgggcctgcgctaccgctccatgcttctgggcaacggccgctacgtgcccttccacatccaagtgccccaaaagttctttgccatcaagaacctgctcctgctcccgggctcctacacctacgagtggaacttccgcaaggatgtcaacatgatcctgcagagttccctcggcaacgacctgcgcgtcgacggcgcctccgtccgcttcgacagcgtcaacctctacgccaccttcttccccatggcgcacaacaccgcctccaccctggaagccatgctgcgcaacgacaccaacgaccagtccttcaacgactacctctcggccgccaacatgctctaccccatcccggccaaggccaccaacgtgcccatctccatcccctcgcgcaactgggccgcttttcgcggctggagtttcacccgtctgaaaaccaaggaaactccctccctcggctcgggttttgacccctactttgtctactcgggctcgatcccctaccttgacgggaccttttaccttaaccacaccttcaagaaggtctccatcatgttcgactcctcggtcagctggcccggcaacgaccggctgctcacgccgaacgagttcgagatcaagcgcagcgtcgacggggagggctacaacgtggcccaatgcaacatgaccaaggactggttcctcgtccagatgctctcccactacaacatcggctaccagggcttccacgtgcccgagggctacaaggaccgcatgtactccttcttccgcaacttccagcccatgagcaggcaggtggtcgatgagatcaactacaaggactacaaggccgtcaccctgcccttccagcacaacaactcgggcttcaccggctaccttgcacccaccatgcgccaagggcagccctaccccgccaacttcccctacccgctcatcggccagacagccgtgccatccgtcacccagaaaaagttcctctgcgacagggtcatgtggcgcatccccttctccagcaacttcatgtccatgggcgccctcaccgacctgggtcagaacatgctctacgccaactcggcccacgcgctcgacatgaccttcgaggtggaccccatggatgagcccaccctcctctatcttctcttcgaagttttcgacgtggtcagagtgcaccagccgcaccgcggcgtcatcgaggccgtctacctgcgcacgcccttctccgccggaaacgccaccacctaagcatgagcggctccagcgaaagagagctcgcgtccatcgtgcgcgacctgggctgcgggccctactttttgggcacccacgacaagcgattcccgggctttcttgccggcgacaagctggcctgcgccatcgtcaacacggccggccgcgagaccggaggcgtgcactggctcgccttcggctggaacccgcgctcgcgcacctgctacatgttcgacccctttgggttctcggaccgccggctcaagcagatttacagcttcgagtacgaggccatgctgcgccgaagcgccctggcctcctcgcccgaccgctgtctcagcctcgaacagtccacccagaccgtgcaggggcccgactccgccgcctgcggacttttctgttgcatgttcttgcatgccttcgtgcactggcccgaccgacccatggacgggaaccccaccatgaacttgctgacgggggtgcccaacggcatgctacaatcgccacaggtgctgcccaccctcaggcgcaaccaggaggagctctatcgcttcctcgcgcgccactccccttactttcgctcccaccgcgccgccatcgaacacgccaccgcttttgacaaaatgaaacaactgcgtgtatctcaataaacagcacttttattttacatgcactggagtatatgcaagttatttaaaagtcgaaggggttctcgcgctcatcgttgtgcgccgcgctggggagggccacgttgcggtactggtacttgggctgccacttgaactcggggatcaccagtttgggcactggggtctcggggaaggtctcgctccacatacgccggctcatctgcagggcgcccagcatgtccggggcggatatcttgaaatcgcagttgggaccggtgctctgcgcgcgcgagttgcggtacacggggttgcagcactggaacaccatcagactggggtactttacgctggccagcacgctcttgtcgctgatctgatccttgtccagatcctcggcgttgctcaggccgaatggggtcatcttgcacagttggcgacccaggaatggcacgctctgaggcttgtggttacactcgcagtgcacgggcatcagcatcatccccgcgccgcgctgcatattcgggtagagggccttgacaaaggccgtgatctgcttgaaagcttgttgggccttggccccctcgctgaaaaacaggccgcagctcttcccgctgaactggttattcccgcacccggcatcctgcacgcagcagcgcgcgtcatggctggtcagttgcaccacgcttcttccccagcggttctgggtcaccttggctttgctgggttgctccttcaacgcgcgctgcccgttctcgctggtcacatccatctccaccacgtggtccttgtggatcatcaccgttccatgcagacacttgagctggccttccacctcggtgcagccgtgatcccacagggcactgccggtgcactcccagttcttgtgcgcgatcccgctgtggctgaagatgtaaccttgcaagaggcgacccatgatggtgctaaagctcttctgggtggtgaaggttagttgcagaccgcgggcctcctcgttcatccaggtctggcacatcttttggaagatctcggtctgctcgggcatgagcttgtaagcatcgcgcaggccgctgtcgacgcggtaacgttccatcagcacgttcatggtatccatgcccttttcccaggacgagaccagaggcagactcagggggttgcgcacgttcaggacaccgggggtcgcgggctcgacgatacgttttccgtccttgccttccttcaacagaaccggaggctggctgaatcccactcccacaatcacggcatcttcctggggcatctcttcgtcggggtctaccttggtcacatgcttggtctttctggcttgcttcttttttggagggctgtccacggggaccacgtcctcctcggaagacccggagcccacccgctgatactttcggcgcttggtgggcagaggaggtggcggcggcgaggggctcctctcctgctccggcggatagcgcgccgacccgtggccccggggcggagtggcctctcgctccatgaaccggcgcacgtcctgactgccgccggccattgtttcctaggggaagatggaggagcagccgcgtaagcaggagcaggaggaggacttaaccacccacgagcaacccaaaatcgagcaggacctgggcttcgaagagccggctcgtctagaacccccacaggatgaacaggagcacgagcaagacgcaggccaggaggagaccgacgctgggctcgagcatggctacctgggaggagaggaggatgtgctgctgaaacacctgcagcgccagtccctcatcctccgggacgccctggccgaccggagcgaaacccccctcagcgtcgaggagctgtgtcgggcctacgagctcaacctcttctcgccgcgcgtgccccccaaacgccagcccaacggcacctgcgagcccaacccgcgtctcaacttctatcccgtctttgcggtccccgaggcccttgccacctatcacatctttttcaagaaccaaaagatccccgtctcctgccgcgccaaccgcacccgcgccgacgcgctcctcgctctggggcccggcgcgcgcatacctgatattgcttccctggaagaggtgcccaaaatcttcgaagggctcggtcgggacgagacgcgcgcggcgaacgctctgaaagaaacagcagaggaagagggtcacactagcgccctggtagagttggaaggcgacaacgccaggctggccgtgctcaagcgcagcgttgagctcacccacttcgcctaccccgccgtcaacctcccgcccaaggtcatgcgtcgcatcatggatcagctaatcatgccccacatcgaggccctcgatgaaagtcaggagcagcgccccgaggacacccggcccgtggtcagcgatgagcagcttgcgcgctggcttggtacccgcgacccccaggccctggagcagcggcgcaagctcatgctggccgtggtcctggtcaccctcgagctcgaatgcatgcgacgctttttcagcgaccccgagaccctgcgcaaggtcgaggagaccctgcactacacttttaggcacggtttcgtcaggcaggcatgcaagatctccaacgtggagctgaccaacctggtctcctgcctgggaatcctgcacgagaaccgcctggggcagacagtgctccactcgaccctgaagggcgaggcgcggcgggactatgtccgcgactgcgtctttctctttctctgccacacatggcaagctgccatgggcgtgtggcagcagtgtctcgaggacgagaacctgaaggagctggacaagcttcttgctagaaacctcaaaaagctgtggacgggctttgacgagcgcaccgtcgcctcggacctggccgagatcgtcctccccgagcgcctgaggcagacgctgaaaggcgggctgcccgacttcatgagccagagcatgttgcaaaactaccgcactttcattctcgagcgatctgggatgctgcccgccacctgcaacgccttcccctccgactttgtcccgctgagctaccgcgagtgtcccccgccgctgtggagccactgctacctcttgcagctggccaactacatcgcctaccactcggatgttatcgaggacgtgagcggcgaggggctgctagagtgccactgccgctgcaacctgtgctctccgcaccgctccctggtctgcaacccccagctcctgagcgagacccaggtcatcggtaccttcgagctgcaaggtccgcaggagtccaccgctccgctgaaactcacgccggggttgtggacttccgcgtacctgcgcaaatttgtacccgaggactaccacgcccatgagataaagttcttcgaggaccaatcgcgcccgcagcacgcggatctcacggcctgcgtcatcacccagggcgcgatcctcgcccaattgcacgccatccaaaaatcccgccaagagtttcttttgaaaaagggtagaggggtctatctggacccccagacgggcgaggtgctcaacccgggtctcccccagcatgccgaggaagaagcaggagccgctagtggaggagatggaagaagaatgggacagccaggcagaggaggacgaatgggaggaggagacagaggaggaagaattggaagaggtggaagaggagcaggcaacagagcagcccgtcgccgcaccatccgcgccggcagccccggcggtcacggatacaacctccgcagctccggccaagcctcctcgtagatgggatcgagtgaagggtgacggtaagcacgagcggcagggctaccgatcatggagggcccacaaagccgcgatcatcgcctgcttgcaagactgcggggggaacatcgctttcgcccgccgctatctgctcttccatcgcggggtgaacatcccccgcaacgtgttgcattactaccgtcaccttcacagctaagaaaaaatcagaagtaagaggagtcgccggaggaggcctgaggatcgcggcgaacgagcccttgaccaccagggagctgaggaatcggatcttccccactctttatgccatttttcagcagagtcgaggtcagcagcaagagctcaaagtaaaaaaccggtctctgcgctcgctcacccgcagttgcttgtaccacaaaaacgaagatcagctgcagcgcactctcgaagacgccgaggctctgttccacaagtactgcgcgctcactcttaaagactaaggcgcgcccacccggaaaaaaggcgggaattacctcatcgccaccatgagcaaggagattcccaccccttacatgtggagctatcagccccagatgggcctggccgcgggcgcctcccaggactactccacccgcatgaactggctcagtgccggcccctcgatgatctcacgggtcaacggggtccgtaaccatcgaaaccagatattgttggagcaggcggcggtcacctcaacgcccagggcaaagctcaacccgcgtaattggccctccaccctggtgtatcaggaaatccccgggccgactaccgtactacttccgcgtgacgcactggccgaagtccgcatgactaactcaggtgtccagctggccggcggcgcttcccggtgcccgctccgcccacaatcgggtataaaaaccctggtgatacgaggcagaggcacacagctcaacgacgagttggtgagctcttcaatcggtctgcgaccggacggagtgttccaactagccggagccgggagatcgtccttcactcccaaccaggcctacctgaccttgcagagcagctcttcggagcctcgctccggaggcatcggaaccctccagtttgtggaggagtttgtgccctcggtctacttcaaccccttctcgggatcgccaggcctctacccggacgagttcataccgaacttcgacgcagtgagagaagcggtggacggctacgactgaatgtcttatggtgactcggctgagctcgctcggttgaggcacctagaccactgccgccgcctgcgctgcttcgcccgggagagctgcggacttatctactttgagtttcccgaggagcaccccaacggccctgcacacggagtgcggatcaccgtagagggcaccaccgagtctcacctggttaggttcttcacccagcaacccttcctggtcgagcgggaccggggaggcaccacctacaccgtctactgcatctgtccaaccccgaagttgcatgagaatttttgttgtactctgtgtgctgagtttaataaaagctaaactcctacaatactctgggatcccgtgtcgtcgcactcgcaacaagaccttcaacctcaccaaccagactgaggtaaaattcaactgcagaccgggggacaaatacatcctctggctttttaaaaacacttccttcgcagtctccaacgcctgcgccaacgacggtattgaaatacccaacaaccttaccagtggactaacttatactaccagaaagactaagctagtactctacaatccttttgtagagggaacctaccactgccagagcggaccttgcttccacactttcactttggtgaacgttaccgacagcagcacagccgctacagaaacatctaaccttctttttgatactaacactcctaaaaccggaggtgagctctgggttccctctctaacagaggggggtaaacatattgaagcggttgggtatttgattttaggggtggtcctgggtgggtgcatagcggtgctgtattaccttccttgctggatcgaaatcaaaatctttatctgctgggtcagacattgttgggaggaaccatgaaggggctcttgctgattatcctttccctggtggggggtgtactgtcatgccacgaacagccacgatgtaacatcaccacaggcaatgagaggagtgtgatatgcacagtagtcatcaaatgcgagcatacatgccctctcaacatcacattcaaaaaccgtaccatgggaaatgcatgggtgggcgactgggaaccaggagatgagcagaactacacggtcactgtccatggtagcaatggaaatcacacttttggtttcaaattcatttttgaagtcatgtgtgatatcacactgcatgtggctagacttcatggcttgtggccccctaccaaggataacatggttgggttttctttggcttttgtgatcatggcctgtgcaatgtcaggtctgctggtaggggctttagtgtggttcctaaagcgcaagcctaggtatggaaatgaggagaaggaaaaattgctataaatctttttctcttcgcagaaccatgaatacagtgatccgtatcgtgctgctctctcttcttgtaacttttagtcaggcaggatttcataccatcaatgctacatggtgggctaatataactttagtgggaccctcagatattccagtcacatggtatgatagcactggattgcaattttgtgatggaagtacagttaagaatccacagatcagacatagttgtaatgatcaaaacttaactctgattcatgtgaacaaaacccatgaaagaacatacatgggctataataagcagagtactcataaagaagactataaagtcacagttataccacctcctcctgttactgtaaagccacaaccagagccagaatatgtgtatgttaatatgggagagaacaaaaccttagttgggcctccaggaattccagttagttggtttaatcaggatggtttacaattttgcattggggataaagtttttcatccagaattcaaccacacctgtgacatgcaaaatcttacactgttgtttataaatcttacacatgatggagcttatcttggttataatcgccagggaactgaaagaacttggtatgaggttgtagtgtcagatggttttccaaaatcagaagagatgaaggtagaagaccatagtaaagaaacagaacaaaaacagactggtcaaaaacaaagtgaccataagcagggtgggcaaaaagaaacaagtcaaaagaaaactaatgacaaacaaaagccatcgcgcaggaggccatctaaactaaagccaaacacacctgacacaaaactaattacagtcactagtgggtcaaacgtaactttagttggtccagatggaaaggtcacttggtatgatgatgatttaaaaagaccatgtgagcctgggtataagttagggtgtaagtgtgacaatcaaaacctaaccctaatcaatgtaactaaactttatgagggagtttactatggtactaatgacagaggcaacagcaaaagatacagagtaaaagtaaacactactaattctcaaagtgtgaaaattcagccgtacaccaggcctactactcctgatcagaaacacagatttgaattgcaaattgattctaatcaagacaaaattccatcaactactgtggcaatcgtggtgggagtgatcgcgggctttgtaactctaatcattattttcatatgctacatctgctgccgcaagcgtcccaggtcatacaatcatatggtagacccactactcagcttctcttactgaaactcagtcactctcatttcagaaccatgaaggctttcacagcttgcgttctgattagcatagtcacacttagttcagctgcaatgattaatgttaatgtcactagaggtggtaaaattacattgaatgggacttatccacaaactacatggacaagatatcataaagatggatggaaaaatatttgtgaatggaatgttactgcatacaaatgcttcaataatggaagcattactattactgccactgccaacattacttctggcacatacaaagctgaaagctataaaaatgaaattaaaaaattaacctataaaaacaacaaaaccacatttgaagattctggaaattatgagcatcaaaaattatctttttatatgttgacaataattgaactgcctacaaccaaggcacccaccacagttagtacaactacacagtcaactgttaagaccactactcacactacacagctagacaccacagtgcagaataatactgtgttggttaggtatttgttgagggaggaaagtactactgaacagacagaggctacctcaagtgcctttatcagcactgcaaatttaacttcgcttgcttggactaatgaaaccggagtatcattgatgcatggccagccttactcaggtttggatattcaaattacttttctggttgtctgtgggatctttattcttgtggttcttctgtactttgtctgctgtaaagccagaaagaaatctaggaggcccatctacaggccagtgattggggaacctcagccactccaagtggatggaggcttaaggaatcttcttttctcttttacagtatggtgatcagccatgattcctaggttcttcctatttaacatcctcttctgtctcttcaacatctgtgctgcctttgcggcagtttcgcacgcctcgcccgactgtctagggcctttccccacctacctcctctttgccctgctcacctgcacctgcgtctgcagcattgtctgcctggtcatcaccttcctgcagctcatcgactggtgctgcgcgcgctacaattaccttcatcatagtcccgaatacagggacgagaacgtagccagaattttaaggctcatatgaccatgcagactctgctcatactgctatcgctcttatcccatgccctcgctactgctgattactctaaatgcaaattggcggacatatggaatttcttagactgctatcaggagaaaattgatatgccctcctattacttggtgattgtgggaatagttatggtctgctcctgcactttctttgccatcatgatctacccctgttttgatcttggatggaactctgttgaggcattcacatacacactagaaagcagttcactagcctccacgccaccacccacaccgcctccccgcagaaatcagtttcccatgattcagtacttagaagagccccctccccgacccccttccactgttagctactttcacataaccggcggcgatgactgaccaccacctggacctcgagatggacggccaggcctccgagcagcgcatcctgcaactgcgcgtccgtcagcagcaggagcgtgccgccaaggagctcctcgatgccatcaacatccaccagtgcaagaagggcatcttctgcctggtcaaacaggcaaagatcacctacgagctcgtgtccaacggcaaacagcatcgcctcacctatgagatgccccagcagaagcagaagttcacctgcatggtgggcgtcaaccccatagtcatcacccagcagtcgggcgagaccaacggctgcatccactgctcctgcgaaagccccgagtgtatctactcccttctcaagaccctttgcggactccgcgacctcctccccatgaactgatgttgattaaaaaccaaaaaaaacaatcagccccttcccctatcccaaattactcgcaaaaataaatcattggaactaatcatttaataaagatcacttacttgaaatctgaaagtatgtctctggtgtagttgttcagcagcacctcggtaccctcctcccaactctggtactccagtctccggcgggcggcgaactttctccacaccttgaaagggatgtcaaattcctggtccacaattttcattgtcttccctctcagatgtcaaagaggctccgggtggaagatgacttcaaccccgtctacccctatggctacgcgcggaatcagaatatccccttcctcactcccccctttgtctcctccgatggattcaaaaacttcccccctggggtcctgtcactcaaactggctgacccaatcaccatagccaatggtgatgtctcactcaaggtgggagggggacttactttgcaagaaggaagtctgactgtagaccctaaggctcccttgcaacttgcaaacaataaaaaacttgagcttgtttatgttgatccatttgaggttagtgccaataaacttagtttaaaagtaggacatggattaaaaatattagatgacaaaagtgctggagggttgaaagatttaattggcaaacttgtggttttaacagggaaaggaataggcactgaaaatttgcaaaatacagatggtagcagcagaggaattggtataagtgtaagagcaagagaagggttaacatttgacaatgatggatacttggtagcatggaacccaaagtatgacacgcgcacactttggacaacaccagacacatctcctaattgcaggattgataaggagaaggattcaaaactcactttggtacttacaaagtgtggaagtcaaatattagctaatgtgtctttgattgtggtgtcaggaaaatatcaatacatagaccacgctacaaatccaactcttaaatcatttaaaataaaacttctttttgataataaaggtgtacttctcccaagttcaaaccttgattccacatattggaactttagaagtgacaatttaactgtatctgaggcatataaaaatgcagttgaatttatgcctaatttggtagcctacccaaaacctaccactggctctaaaaaatatgcaagggatatagtctatgggaacatatatcttggaggtttggcatatcagccagttgtaattaaggttacttttaatgaagaagcagatagtgcttactctataacatttgaatttgtatggaataaagaatatgccagggttgaatttgaaaccacttcctttaccttctcctatattgcccaacaataaaagaccaataaacgtgttttttatttcaaattttatgtatctttattgatttttacaccagcgcgagtagtcaatctcccaccaccagcccatttcacagtgtacacggttctctcagcacgggtggccttaaatagggaaatgttctgattagtgcgggaactggacttggggtctataatccacacagtttcctggcgagccaaacggggatcggtgattgaaatgaagccgtcctctgaaaagtcatccaagcgggcctcacagtccaaggtcacagtctggtggaacgagaagaacgcacagattcatactcggaaaacaggatgggtctgtgcctctccatcagcgccctcagcagtctctgccgccggggctcggtgcggctgctgcagatgggatcgggatcacaagtctctctaactatgatcccaacagccttcagcatcagtctcctggtgcgtcgagcacagcaccgcatcctgatctctgccatgttctcacagtaagtgcagcacataatcaccatgttattcagcagcccataattcagggtgctccagccaaagctcatgttggggatgatggaacccacgtgaccatcgtaccagatgcggcagtatatcaggtgcctgcccctcatgaacacactgcccatatacatgatctctttgggcatgtttctgtttacaatctggcggtaccaggggaagcgctggttgaacatgcacccgtaaatgactctcctgaaccacacggccagcagggtgcctcccgcccgacactgcagggagccaggggatgaacagtggcaatgcaggatccagcgctcgtacccgctcaccatctgagctcttaccaagtccagggtagcggggcacaggcacactgacatacatctttttaaaatttttatttcctctgtggtgaggatcatatcccaggggactggaaactcttggagcagggtaaagccagcagcacatggtaatccacggacagaacttacattatgataatctgcatgatcacaatcgggcaacaggggatgttgatcagtcagtgaagccctggtttcatcatcagatcgtggtaaacgggccctgcgatatggatgatggcggagcgagctggattgaatctcggtttgcattgtagtggattctcttgcgtaccttgtcgtacttctgccagcagaaatgggcccttgaacagcatatacccctcctgcggccgtcctttcgctgctgccgctcagtcatccaactgaagtacatccattctcgaagattctggagaagttcctctgcatctgatgaaataaaaaacccgtccatgcgaattcccctcatcacatcagccaggactctgtaggccatccccatccagttaatgctgccttgtctatcattcagagggggcggtggcaggattggaagaaccatttttattccaaacggtctcgaaggacgataaagtgcaagtcacgcaggtgacagcgttcccctccgctgtgctggtggaaacagacagccaggtcaaaacccactctattttcaaggtgctcgaccgtggcttcgagcagtggctctacgcgtacatccagcataagaatcacattaaaggctggccctccatcgatttcatcaatcatcaggttacattcctgcaccatccccaggtaattctcatttttccagccttggattatctctacaaattgttggtgtaaatccactccgcacatgttgaaaagctcccacagtgccccctccactttcataatcaggcagaccttcataatagaaacagatcctgctgctccaccacctgcagcgtgttcaaaacaacaagattcaataaggttctgccctccgccctgagctcgcgcctcaatgtcagctgcaaaaagtcacttaagtcctgggccactacagctgacaattcagagccagggctaagcgtgggactggcaagcgtgagggaaaactttaatgctccaaagctagcacccaaaaactgcatgctggaataagctctctttgtgtctccggtgatgccttccaaaatgtgagtgataaagcgtggtagtttttctttaatcatttgcgtaatagaaaagtcctgtaaataagtcactaggaccccagggaccacaatgtggtagcttacaccgcgtcgctgaagcatggttagtagagatgagagtctgaaaaacagaaagcatgcgctaaactaaggtggctattttcactgaaggaaaaatcactctttccagcagcagggtacccactgggtggcccttgcggacatacaaaaatcggtccgtgtgattaaaaagcagcacagtaagttcctgtcttcttccggcaaaaatcacatcggactgggttagtatgtccctggcatggtagtcattcaaggccataaatctgccctgatatccagtaggaaccagcacactcacttttaggtgaagcaataccaccccatgcggaggaatgtggaaagattcagggcaaaaaaaattatatctattgctagccccttcctggacgggagcaatccctccaggactatctatgaaagcatacagagattcagccatagctcagcccgcttaccagtagacaaagagcacagcagtacaagcgccaacagcagcgactgactacccactgacttagctccctatttaaaggcaccttacactgacgtaatgaccaaaggtctaaaaaccccgccaaaaaaaacacacacgccctgggtgtttttgcgaaaacacttccgcgttctcacttcctcgtatcgatttcgtgacttaacttccgggttcccacgttacgtcacttttgcccttacatgtaacttagtcgtagggcgccatcttgcccacgtccaaaatggcttacatgtccagttacgcctccgcggcgaccgttagccgtgcgtcgtgacgtcatttgcatcaacgtttctcggccaatcagcagtagccccgccctaaatttaaaacctcatttgcatattaacttttgtttactttgtggggtatattattgatgatgagatctacaacttatatcgtatggggctgacttcaggtgctacatttgaagagataaattgcactgaaatctagaaatattttatctgattaataagatgatcttcttgagatcgttttggtctgcgcgtaatctcttgctctgaaaacgaaaaaaccgccttgcagggcggtttttcgaaggttctctgagctaccaactctttgaaccgaggtaactggcttggaggagcgcagtcaccaaaacttgtcctttcagtttagccttaaccggcgcatgacttcaagactaactcctctaaatcaattaccagtggctgctgccagtggtgcttttgcatgtctttccgggttggactcaagacgatagttaccggataaggcgcagcggtcggactgaacggggggttcgtgcatacagtccagcttggagcgaactgcctacccggaactgagtgtcaggcgtggaatgagacaaacgcggccataacagcggaatgacaccggtaaaccgaaaggcaggaacaggagagcgcacgagggagccgccagggggaaacgcctggtatctttatagtcctgtcgggtttcgccaccactgatttgagcgtcagatttcgtgatgcttgtcaggggggcggagcctatggaaaaacggctttgccgcggccctctcacttccctgttaagtatcttcctggcatcttccaggaaatctccgccccgttcgtaagccatttccgctcgccgcagtcgaacgaccgagcgtagcgagtcagtgagcgaggaagcggaatatatcctgtatcacatattctgctgacgcaccggtgcagccttttttctcctgccacatgaagcacttcactgacaccctcatcagtgccaacatagtaagccagtatacactccgctagcgcgatcgcttaattaatttaaatcctgcagggtttaaacggccggcctagggataacagggtaatcgtaactataacggtcctaaggtagcgaatgatgtccggcggtgcttttgccgttacgcaccaccccgtcagtagctgaacaggagggacagctgatagaaacagaagccactggagcacctcaaaaacaccatcatacactaaatcagtaagttggcagcatcacccgacgcactttgcgccgaataaatacctgtgacggaagatcacttcgcagaataaataaatcctggtgtccctgttgataccgggaagccctgggccaacttttggcgaaaatgagacgttgatcggcacgtaagaggttccaactttcaccataatgaaataagatcactaccgggcgtattttttgagttatcgagattttcaggagctaaggaagctaaa

SEQ ID NO: 1416 - DNA, 833 bp, Adenovirus F41
  MISC_FEATURE (1)..(833): F41.ORF00001 E1A
atgagaatgctgccggacttcttcaccgggaactgggatgacatgttccaggggctgctggaggctgagcatctgtttgattttcctgaaccttctcaggcttttgaagagatttcgcttcacaatctttttgatgtggagctggatgagtctgaaggggatccgaatgaggaagcggtagatggtatgtttcctaactggatgctgtccgaggaccacagtgctgacagtggtgcggcttcgggcgattctggggttggagaagacctggtggaggttaatttggacttgaaatgctatgaagagggtttgcctcctagcggctcggaggctgatgaagctgaagaacgagcggaggaggaagagacggctgtgtcgaattatgtgaatattgctgagggtgctagtcagctggtgttggactgtccagaaaacccgggacgaggttgtcgggcttgtgattttcatcggggctctagtggaaatcctgaagctatgtgtgctttatgttacatgcgtctgaccggtcactgcatttacagtaagtagagatttttttttttgttttatactgctggatgatgtgtgggggttaacgtgcttttttgtgcttactaggtccgatttcagatgcggaaggagagtgtgagttggggtcaaatgaggagactgagctgccttgttctttgaccgccacggcaccagtaagacccaccccatgcagagtttcctgtagacgacgcccagccgttgattgcatagaagatttacttgaggaggatccgacggatgaacctttaaacttgtccttaaagcgccccaagtcctcttga

SEQ ID NO: 1417 - DNA, 513 bp, Adenovirus F41
  MISC_FEATURE (1)..(513): F41.ORF00002 E1B 19K
atggagttttggagtgagctacaaagttatcagagcctccgacgcttgctggagttggcttctgccagaacttccagctgttggaggtttatttttggttcaaccttaactaatgtaatttatagagctaaagaggactactcttcgcgatttgctgagcttttgtcttttaaccctggaatttttgcatctttaaatttgggccaccactcatttttccaggaaattgtgatcaaaaacttagatttttcttcccccggccgtacggtttctgggcttgctttcatttgttttatattggatcaatggagcgcccaaacccatctgtcggaggggtatactctggattacatgacaatggccctgtggagaaccctgctgcggaggaagagggtcttaggttgctcgccggcgcagcctccgcacggtctggatccagtgcgggaggaggaggaggaggaggaggaggaggagaacctgagggccggtctggatcctcaaacggaattgtaa

SEQ ID NO: 1418 - DNA, 1419 bp, Adenovirus F41
  MISC_FEATURE (1)..(1419): F41.ORF00003 E1B 55K
atggagcgcccaaacccatctgtcggaggggtatactctggattacatgacaatggccctgtggagaaccctgctgcggaggaagagggtcttaggttgctcgccggcgcagcctccgcacggtctggatccagtgcgggaggaggaggaggaggaggaggaggaggagaacctgagggccggtctggatcctcaaacggaattgtaactgaacctgaccccgaagagggtactagcagtgggcaaaggggggagaaaaggaagttagaaaatgacggggcggattttctaaaggagttaaccttgagtttaatgtctcgttgttatcctgagtctgtctggtgggctgatttggaagatgagtttaaaaatggaaacatgaatcttttatacaagtatggatttgaacagctgaaaacacattggatggagccttgggaggactgggaactagctttgaatatgtttgccaaagtggctcttcgcccagacactatttataccattaagaaaactgttaatatacgtaaatgtgcctatgtaattggaaatggagccgtggttagattccaaacctttgaccgggtggtttttaactgtgcaatgcagagtttaggtcctggggtgattggtatgagcggggtaacatttaataatgtcagatttgcagcagatggatttaatggcaaggtgtttgcttctaccactcaattaactttgcatggtgtgttttttcaaaattgcagcggtgtttgcgtggattcctggggtagggtgtctgccagaggttgtacgtttgtgggatgttggaaagggctggtggggcaaaacaagagccaaatgtctgtaaaaaaatgtgtgtttgaacgatgcattttggctatggtggtagaaggccaggcgcgaattcgacataatgcgggttccgaaaatgtgtgctttttactgctgaagggaactgccagtgttaagcataatatgatttgtggcactggtcactctcagctgctaacttgcgcagatggaaactgtcagactctaaaagtgattcatgtggtttcccatcagcgccgcccctggcctgtttttgagcataacatgcttatgcgttgtaccatgcatttgggggctcgtcgtggcatgttttctccatatcagagtaatttttgccatactaaagttttaatggaaactgatgctttttcgcgggtgtggtggagcggggtgtttgatttgaccatagagctgtataaagtggtgagatatgatgagttaaaggctcgttgtcgcccctgtgagtgtggagccaatcacatcaggttatatccagcaactctgaacgtgacggagcagctgcgcacggaccatcagatgttgtcgtgtcttcgcaccgactacgaatccagcgatgaggattaa

SEQ ID NO: 1419 - DNA, 402 bp, Adenovirus F41
  MISC_FEATURE (1)..(402): F41.ORF00004 IX
atgagcggctccatggaagggaacgctgtgagttttaagggtggggtgtttagcccatatttgacaacccgtcttcccgcttgggcaggagtacgtcagaatgtgatgggctccaacgtggacggtcgtcctgtcgcccccgccaattcagcaacccttacctatgccactgttggatcgtcggtggacaccgctgcggctgctgccgcttctgccgctgcctctactgctcgtggtatggcagctgattttggactttacaatcaactggctgcgtctcggtcgttgagggaagaagatgccctgtctgtggtgctgacccgcctggaggagctgtctcagcaattgcaagatttgtttgccaaagtggccctgcttaaccctcccgctaatgcttcttaa

SEQ ID NO: 1420 - DNA, 1619 bp, Adenovirus F41
  MISC_FEATURE (1)..(1619): F41.ORF00005 IVA2
ttatttgtttcttttgcggtaggccctggaccacctgtcgcggtcgttgaggactttgtggatgttttccaagacccggtacaaatgggcttggatgtttagatacatgggcataaggccgtccctggggtggaggtaggaccactggagggcgtcatgctcgggggtggtgttgtaaataatccaatcgtaacagggtttttgggcatgaaactgaaatatgtccttaaggagcaggctaatggccaggggtagtcccttggtaaaagtattaacaaatcgattaagttgggaaggatgcatgcggggggagattagatgcatttttgcctggatttttagattggcaatgttacccccgaggtcccgtctggggttcatgttgtgcaggaccaccagcacggtgtagccggtgcatttggggaatttgtcatgcaacttggaagggaaggcgtggaaaaactttgaaacccctttgtgaccccccagattttccatgcactcatccataattatggcgatgggacctttggccgcagctttagcaaaaatgttattggggtgggatacatcatagttttgctccaacgtgagctcgtcataggccattttaacaaagcggggaagaagggttcctgactgggggattatggtaccttccggaccgggggcatagttaccctcgcaaatttgcatctcccaagccttaatttcggatgggggaatcatgtccacttggggggcgatgaaaaaaacggtttcggggggaggattaataagctgggaggaaagcaggttccgcagaagctgggatttgccgcagccagtggggccataaatgaccccgatgacaggctgcaattggtagtttaaggagctgcagctgccgtcttcccgcaggagtggggtaacttcgttcatcatgcttctgacatgctggttttccctgaccaggtcttgcaagagacgttcaccacccagggaaagaagctcttccaagttgcggaaatgctttagtggttttaggccgtcggccatggtcattttttccaaagactgacgtagaagatagagccgatcccagagctcggtgatatgctctatggcatctcgatccagcaaacttcttggttgcggggattgggccggctttggctgtacggtaccagccggtgggcgtccagaggggcgagggtgatgtctttccaaggccgaagagttcgcgttagggtggtctcggtgacagtgaagggatgcgctccgggctgggcgcttgccagggttctcttcaggctcatcctgctggtgtgaaagcgcgcgtcttcgccctgagagtcagccaagtagcattttagcatcagctcatagcttagggcttcggctgcgtgtcctttggctcgaagcttgcctttggaaatgtgctgacagctgggacagtagaggcatttcagggcgtagagtttgggtgccaggaagacagattccggcgagtaagcgttggcaccgcactgtgcacacgtggtttcgcactccactaaccaggttagttcgggattttttggatcaaaaaccagactgcccccgtgttttttgatgcgtttcttacctcgggtttccat

SEQ ID NO: 1421 - DNA, 8433 bp, Adenovirus F41
  MISC_FEATURE (1)..(8433): F41.ORF00006 E2B DNA POL
ctatggcatctcgatccagcaaacttcttggttgcggggattgggccggctttggctgtacggtaccagccggtgggcgtccagaggggcgagggtgatgtctttccaaggccgaagagttcgcgttagggtggtctcggtgacagtgaagggatgcgctccgggctgggcgcttgccagggttctcttcaggctcatcctgctggtgtgaaagcgcgcgtcttcgccctgagagtcagccaagtagcattttagcatcagctcatagcttagggcttcggctgcgtgtcctttggctcgaagcttgcctttggaaatgtgctgacagctgggacagtagaggcatttcagggcgtagagtttgggtgccaggaagacagattccggcgagtaagcgttggcaccgcactgtgcacacgtggtttcgcactccactaaccaggttagttcgggattttttggatcaaaaaccagactgcccccgtgttttttgatgcgtttcttacctcgggtttccatgaggcgatgaccggcttcggtgacaaagaggctgtcggtgtcgccgtataccgatttgagggtacgctgctccaacggcgtgcctcggtcctccgcgtacagaaactcggaccattctgagacaaaagcccgggtccaggccagaacaaaggaggcaatttgggaggggtagcggtcgttttccaccagggggtcaaccttttctagggtgtgaaggcaaaggtcatcttcctctgcatccataaatgtgattggtttataagtataggtcacgtgacctttggggtcttgcgtgggtgtataaagggcgtgtccgcgttcttcatcactttcttccgcatcgctgtgggcaagagccagctgttcgggtgagtacgcgcgctggaaggcgggcataacttcagcactcaaggtgtcagtttctacgaacgaggtggatttgattttaatttgtcccgcggcaatgcttttgatggtggcagggtccatctggtcagaaaacacaatttttttattatctagtttggtagcaaacgacccgtaaagggcgttggaaagcagcttggcaatggaacgcagcgtctggtttttctcgcgatcggcccgctccttggcggcgatgttgagctgcacgtactttcgtgccacgcagcgccactcgggaaagacagtggtgcgctcgtcaggaagcaaccgtacctgccacccgcggttgtgcagggtgatcagatctatgctagtggccacctcgccccttaggggctcgttggtccagcacaagcgtcctcccttgcgcgagcagtatgggggtagtacatctagtaagttttcagatggagggtcagcgtcaatggtgaagatgccaggaagtaggacgtggttgaaatagtcaatgggagtgtcaacttgcaacagagcgcgttcccagtctcgaaccgctagggcgcgttcgtagggattgagcggcgagccccacggcatgggatgggtaagcgcggaggcgtacatgccacatatgtcgtaaacataaagaggttcacggagcaccccaatgtaagtgggatagcaacgtcctccgcgaatgctggccctgacataatcatacatttcatgtgagggggctagtagtccattgcctagatccgaacgcttaggttttacgctttggtacaagatctgtctaaagatggcgtgggagttggaggaaattgtgggcctttgaaaaacgttaaatttggcttcgggcagacccacggcatcacagatgaattgggcgtaggactctcgcagcttctgtaccaaggcggcggtgacaagcacatccaaagcgcagtagtcaagggtttcgcgtatcagatcataacgagactgttgcttcttttcccaaagttcgcggttcaggaggtactcctcgcggtccttccagtaatcttcggccggaaagccacgttcgtctgcacggtaggaacccaacatgtaaaattggttgacagctttgtaaggacagcagcctttttccaccggaagagcgtacgcttgcgcggcctttctcagagaggtgtgtgtaagagcgaaggtgtcgcgcaccatgactttgaggaattggtgtttaaagtcagtgtcgtcgcaggcgccctgctcccagaggtgatagtcggtgcgctttttggatagcggatttggtagggcaaatgtaatgtcattgaaaaggattttgccggcccgtggcataaagttgcgggtgattttgaaaggtccgggcacgtccgagcggttgttaatcacctgagccgccagcacaatttcatcaaagccgttgatgttatgtcccacaatgtagagttccacaaatcggggtgttccctgtagtttgggggccttttttaactcctcgtaagtaagattatcaggagaaaatagtcccatttcaagtcgggcccattcggccacttggggattggcagcaaggaacgcttgccacagctgggtggcaaaatgggtttgcaaacggtcgcggtagtttcgaaacttttttcctaccgctattttttcgggggtgaccacgtaaaaggtatggccgtcatttccccaggcatcccattgtagttcgtgggccagacggcaggcttcctccactagggtgtcatcccccgagagatgcataactagcataaacgggaccagttgcttaccaaaggctcccatccacgtgtaggtctcaacgtcgtaggtgacgaagaggcgttcaacgcggggatgagagccgatcggaaagaaattgatctcctgccaccagccggaggactgggcgttgatatgatgaaagtagaagtttctccggcggaccgtgcattcgtgctgatatttgtaaaagcgggcgcaatactcgcagcgttgcacgttctgcacctcttgaatgaggtgtacctggtgccctcgcacgagaaatcggagagggaaattaagaggctcctgagcgctctgcctttctccctcgttgttctcttctgcacctgcacgctcctgctgtgggaggatgacggagggagtgacgatgccccgcgaggcgcaggtccaaacctcgacgcggggaggctgaagcctgagagcgagagagcggatttgggagctgtccagggagtccaggaaggcttcgctgaggccggcgggcaaagaacgaaggttaacttgcagaaggcgggtaagggcggacgccaggcgttgatgaaacttaatttcaaggggggagttggtggaagtgtcaatagcgtagaggagaccttgtcctcgggaggctacaatggttcctcggaggcggaaggttgagggagggtttacatcatttgacgcggacgggcgcctgggggcagtggcggttcgggacccgcctgaagaggaggtagaagcacgttggcctggagctcgggtagcggttgatgctgagcccgcagctgactggcgtgcgcgacaacgcggcggttgagttcctggatacgtctttgttgagtgaagaccaagggtccccggactcggaacctgaaagaaagttcaacagaatcaatctccgcatcgttgaccgcgacctgacgcagaatttcctgcacgtcgcccgagttgtcttggtatgcgatctcggacataaactgatcgatctcttcctcctggagctccccccaaccggcccgctccacggtggccgcaagatcgttggagatgcgacccatgagctgggagaaggcgttaagcccgttttcgttccacacacggctgtagacaacgtcaccagtgtcgtcccgggcgcgcattaccacctgggccacgttaagctcaacgtgacgggcaaacacggcgtagttgcgcaagcgctggaaaaggtagttgagggtggtggcaatgtgctcacagacaaagaagtacataacccaacgccgaagagtcatttcgttgatattgccaagggcttccaagcgttccatggcttcgtaaaagtctaccgcaaagttgaagaattgggagttgcgggccgcgactgtcagctcgtcttgcaagaggcggattagctccgccacagtttctcgcacttcgcgttcaaaggcgcccggcgcttcctcgatttcttcttccatgagttcttcctcctctgcaacaggcacctcgggactcgcgggtgccggaacaggtcgtcggcggcgacgcctaatgggcagccgatcgacaaagcgttcgatgatttctccgcggcgacgacgcatggtttcagtgacggcgtgtccgttctctcggggtcgcagctcgaatacaccgccttgcaatcccgttccggagatgggtggtagcaggtggggtccttcgggcagagacagggcgctaactatgcatttgattatctgttgtgtaggcagagattgccaagcgttgttgagcaagtccaattggacgggatcagaaaacttttcaaggaaagcatcgagccaatcacagtcgcaaggtaagctcagaacggtgggctgtgggtttccacgggaggtgatgctgctgatgagatagttgaagtaggcggttttcaaacggcggatggtggcaaggaggataacgtcttttggtccggcctgttggatccgcaggcggtcggccatgccccaggcttcgctctgacatcgacgtagatccttgtagaagtcttgcatgagtctttccacgggaatttctatatctcctcggtcggccatgcgggtagagccgaacccgcggagaggctccaggagggccaggtcggcgaccactctttctgccagcacggcttgctgaatttgagtaagggtgttttggaagtcatctaagtccacaaagcggtgataagagccggtgttaatggtgtacgtgcagttggccatgacggaccagtttacaacttgcattccgggctgggtgatctctgtgtacctaaggcgggagtaggctcgggactcaaagacgtagtcgttgcaggttcgcaccaagtactggtagccaaccaggaagtgaggcggcggttcgcggtagaggggccatcgtagggttgctggggcgcccggcgcaaggtcctccagcataagacgatggtaatggtaaacatagcgagagagccaggtaattccggctgaggtggtcgcagcgcgggtgaactcgcggactcggttccagatgttgcgcaacggtgagaaacgctccatggtgggcacgctttggccggtaagacgggcgcaatcttgtacgctctagatggaaaaatagagagcaatcacggactcttctccgtagcctggaggatagaccgccagggtgcggtggcgaacaacccccggttcgagaccggctggatccgccactcccgacgcgccggccccgtgtccacgacggaaaccccgccgagacctagccgcggtccccggatctccagatacggaggggagtctttttgtcgttttttgtagatgcatccggtgttgcgacagatgcgtccgacgcagccaacgctcccgccccccactagcgcccaggccgccgtggctctttccggagccggcggtggcgaccctgacgaggaggccatgctggatttggaagagggcgagggtttggctcgcctgggagcaccctcccccgagcatcatccccgcgtacaacttaaaagggacgcacgtcaggcctacgtgccgccgcagaacctgtttagggatcgcagcggacaggaacccgaagagatgagggaccgcaggtttcatgcgggaaaggaactgcgggccggtttcaacagccaaagggtgctgcgcgccgaagactttgagcccgacaagcgtagtggagtaagtccggcacgggctcacgtgtcggcggccgatctggtgactgcgtacgagcaaactgtaaacgaggagcgcaactttcaaaaaacctttaacaatcacgtgcgcaccttagtagcgcgagaagaggtggccataggcctgatgcatttgtgggactttatggaagcgtacgtgcagaatccggcaagcaaaccgctgacggcacagctgtttttgattgtacaacacagccgcgataatgaaacttttcgagaagctatgcttaacattgctgagcccgaggggcgctggcttttagacctagtcaacatcctgcagagcatagtggtgcaagagcgcagcttgagcctggccgacaaggtggcggccattaattacagcatgctcagtctcggcaagttttacgcccgcaagatctacaaaactccttacgtgcccatagacaaggaggtgaaaattgatagtttttacatgcgtatggcgctgaaggtgttgacgctgagcgacgatctgggggtttaccgcaacgaccgcattcataaggccgtgagtgccagccgccgccgcgaactgagcgaccgcgagttgatgcacagcctgcgtcgagcattgacgggggccggcggggatgccaatgccgagtcttactttgacatgggggcagatttgcaatggcagccaagtgcccgggctctagaggcggttggataccgcaacgcaatgcaggaggaggatgaggaggaggactacgaggacgagccctgatcggccaggtggtgtttttgtagatgcagcggtcgacggcggtggtggacgggtcgcagcaggtggatcctgccatgttggcagcactgcaaagccaaccctcgggcgtgaccccctcagacgactgggcggcggccatggaccgtattctagctttgaccacccgcaatcctgaagccttcaggcagcagccccaggccaacaggttttcggccattttggaagccgtggtaccctctcgtactaacccaacccacgagaaggtgctggctatcgtgaacgccctaacagaaagcaaagcaattcgcaaggacgaagcgggactgatttacaatgctctgctggaaagggtggcccgatacaacagtaccaacgtacaagccaatcttgaccgccttaccactgacgtgagggaggcggtagcacagcgggagcgctttatgcatgacactaacttgggttcccaggtggcgctaaatgcttttctgagcacgctcccggctaacgttccgcgcggacaggaggattacgttagctttatcagcgcattgcgcctcctggtggcagaagtacctcaaagcgaggtttaccagtcaggtcccgattactttttccaaacttcgcggcagggactgcagacggttaacttgacacaggccttcaaaaacttgcagggcatgtggggtgtgcgggcccccgttggtgaccgcgccaccatttccagtttgctgacgcccaatacccggctgttgttgctgctgattgccccatttacaaatagtagtaccatcagccgggactcataccttggccatctgatcactttgtaccgcgaggctatcggtcagacacaggtagacgaacaaaccttccaggaaatcaccagtgtgagccgtgcgttaggacagcaagacaccgggagtctggaagccactttgaacttcctgctcaccaaccggcaacagaaaattccctcgcaattcacactgagtaccgaggaggagcgtatcttgcgttacgtgcaacagtctgtcagtttatacttaatgcgcgaggggatgaccccatcctcggctctggatatgacggcccgcaacatggaaccgtcgctgtattcgtccaatcggcctttcattaaccgcctaatggactacctgcatcgcgcggcagccatgaacagcgagtactttactaatgccattttgaacccccattggatgcccccctctggtttttatacgggagaatttgacatgcccgagggagatgacggcttcttgtgggacgacgtgtccgacagcatttttgtccctgcgcgttaccgcaagaaggaaggcggtgatgagctgcctttgcccttggtggaagcggcttccaggggccagagccctttcccaagcctcccatcgcttgttagcagcagcaacagcggacgggtgttgcgtccccggcttccaggggagacggactacctaaacgatcccctgttgcaacccgttcgtaataagaactttcctaacaacggggtggaaagtttggtagataaaatgaatcgctggaagacctacgctcaggagcagcgggagtgggaggagagccagtcccgccctttggccggccctttcagccgttggcgccggcgagaagacgaccaggatgactccgccgatgacaatagcgttttggacttggggggaactggtgcttcttccaaccccttcgcccacctacgtcctcagggccgcttgggcagattgtattaaaaaaaaaaaaaaaaaaaaaaaccacttaccagagccat

SEQ ID NO: 1422 - DNA, 570 bp, Adenovirus F41
  MISC_FEATURE (1)..(570): F41.ORF0007 I-LEADER PROTEIN
atgagagccgatcggaaagaaattgatctcctgccaccagccggaggactgggcgttgatatgatgaaagtagaagtttctccggcggaccgtgcattcgtgctgatatttgtaaaagcgggcgcaatactcgcagcgttgcacgttctgcacctcttgaatgaggtgtacctggtgccctcgcacgagaaatcggagagggaaattaagaggctcctgagcgctctgcctttctccctcgttgttctcttctgcacctgcacgctcctgctgtgggaggatgacggagggagtgacgatgccccgcgaggcgcaggtccaaacctcgacgcggggaggctgaagcctgagagcgagagagcggatttgggagctgtccagggagtccaggaaggcttcgctgaggccggcgggcaaagaacgaaggttaacttgcagaaggcgggtaagggcggacgccaggcgttgatgaaacttaatttcaaggggggagttggtggaagtgtcaatagcgtagaggagaccttgtcctcgggaggctacaatggttcctcggaggcggaaggttga

SEQ ID NO: 1423 - DNA, 1878 bp, Adenovirus F41
  MISC_FEATURE (1)..(1878): F41.ORF0008 E2B PRETERMINAL PROTEIN
ttacatcatttgacgcggacgggcgcctgggggcagtggcggttcgggacccgcctgaagaggaggtagaagcacgttggcctggagctcgggtagcggttgatgctgagcccgcagctgactggcgtgcgcgacaacgcggcggttgagttcctggatacgtctttgttgagtgaagaccaagggtccccggactcggaacctgaaagaaagttcaacagaatcaatctccgcatcgttgaccgcgacctgacgcagaatttcctgcacgtcgcccgagttgtcttggtatgcgatctcggacataaactgatcgatctcttcctcctggagctccccccaaccggcccgctccacggtggccgcaagatcgttggagatgcgacccatgagctgggagaaggcgttaagcccgttttcgttccacacacggctgtagacaacgtcaccagtgtcgtcccgggcgcgcattaccacctgggccacgttaagctcaacgtgacgggcaaacacggcgtagttgcgcaagcgctggaaaaggtagttgagggtggtggcaatgtgctcacagacaaagaagtacataacccaacgccgaagagtcatttcgttgatattgccaagggcttccaagcgttccatggcttcgtaaaagtctaccgcaaagttgaagaattgggagttgcgggccgcgactgtcagctcgtcttgcaagaggcggattagctccgccacagtttctcgcacttcgcgttcaaaggcgcccggcgcttcctcgatttcttcttccatgagttcttcctcctctgcaacaggcacctcgggactcgcgggtgccggaacaggtcgtcggcggcgacgcctaatgggcagccgatcgacaaagcgttcgatgatttctccgcggcgacgacgcatggtttcagtgacggcgtgtccgttctctcggggtcgcagctcgaatacaccgccttgcaatcccgttccggagatgggtggtagcaggtggggtccttcgggcagagacagggcgctaactatgcatttgattatctgttgtgtaggcagagattgccaagcgttgttgagcaagtccaattggacgggatcagaaaacttttcaaggaaagcatcgagccaatcacagtcgcaaggtaagctcagaacggtgggctgtgggtttccacgggaggtgatgctgctgatgagatagttgaagtaggcggttttcaaacggcggatggtggcaaggaggataacgtcttttggtccggcctgttggatccgcaggcggtcggccatgccccaggcttcgctctgacatcgacgtagatccttgtagaagtcttgcatgagtctttccacgggaatttctatatctcctcggtcggccatgcgggtagagccgaacccgcggagaggctccaggagggccaggtcggcgaccactctttctgccagcacggcttgctgaatttgagtaagggtgttttggaagtcatctaagtccacaaagcggtgataagagccggtgttaatggtgtacgtgcagttggccatgacggaccagtttacaacttgcattccgggctgggtgatctctgtgtacctaaggcgggagtaggctcgggactcaaagacgtagtcgttgcaggttcgcaccaagtactggtagccaaccaggaagtgaggcggcggttcgcggtagaggggccatcgtagggttgctggggcgcccggcgcaaggtcctccagcataagacgatggtaatggtaaacatagcgagagagccaggtaattccggctgaggtggtcgcagcgcgggtgaactcgcggactcggttccagatgttgcgcaacggtgagaaacgctccat

SEQ ID NO: 1424 - DNA, 1140 bp, Adenovirus F41
  MISC_FEATURE (1)..(1140): F41.ORF0009 52-55K
atgcatccggtgttgcgacagatgcgtccgacgcagccaacgctcccgccccccactagcgcccaggccgccgtggctctttccggagccggcggtggcgaccctgacgaggaggccatgctggatttggaagagggcgagggtttggctcgcctgggagcaccctcccccgagcatcatccccgcgtacaacttaaaagggacgcacgtcaggcctacgtgccgccgcagaacctgtttagggatcgcagcggacaggaacccgaagagatgagggaccgcaggtttcatgcgggaaaggaactgcgggccggtttcaacagccaaagggtgctgcgcgccgaagactttgagcccgacaagcgtagtggagtaagtccggcacgggctcacgtgtcggcggccgatctggtgactgcgtacgagcaaactgtaaacgaggagcgcaactttcaaaaaacctttaacaatcacgtgcgcaccttagtagcgcgagaagaggtggccataggcctgatgcatttgtgggactttatggaagcgtacgtgcagaatccggcaagcaaaccgctgacggcacagctgtttttgattgtacaacacagccgcgataatgaaacttttcgagaagctatgcttaacattgctgagcccgaggggcgctggcttttagacctagtcaacatcctgcagagcatagtggtgcaagagcgcagcttgagcctggccgacaaggtggcggccattaattacagcatgctcagtctcggcaagttttacgcccgcaagatctacaaaactccttacgtgcccatagacaaggaggtgaaaattgatagtttttacatgcgtatggcgctgaaggtgttgacgctgagcgacgatctgggggtttaccgcaacgaccgcattcataaggccgtgagtgccagccgccgccgcgaactgagcgaccgcgagttgatgcacagcctgcgtcgagcattgacgggggccggcggggatgccaatgccgagtcttactttgacatgggggcagatttgcaatggcagccaagtgcccgggctctagaggcggttggataccgcaacgcaatgcaggaggaggatgaggaggaggactacgaggacgagccctga

SEQ ID NO: 1425 - DNA, 1740 bp, Adenovirus F41
  MISC_FEATURE (1)..(1740): F41.ORF00010 IIIA
atgcagcggtcgacggcggtggtggacgggtcgcagcaggtggatcctgccatgttggcagcactgcaaagccaaccctcgggcgtgaccccctcagacgactgggcggcggccatggaccgtattctagctttgaccacccgcaatcctgaagccttcaggcagcagccccaggccaacaggttttcggccattttggaagccgtggtaccctctcgtactaacccaacccacgagaaggtgctggctatcgtgaacgccctaacagaaagcaaagcaattcgcaaggacgaagcgggactgatttacaatgctctgctggaaagggtggcccgatacaacagtaccaacgtacaagccaatcttgaccgccttaccactgacgtgagggaggcggtagcacagcgggagcgctttatgcatgacactaacttgggttcccaggtggcgctaaatgcttttctgagcacgctcccggctaacgttccgcgcggacaggaggattacgttagctttatcagcgcattgcgcctcctggtggcagaagtacctcaaagcgaggtttaccagtcaggtcccgattactttttccaaacttcgcggcagggactgcagacggttaacttgacacaggccttcaaaaacttgcagggcatgtggggtgtgcgggcccccgttggtgaccgcgccaccatttccagtttgctgacgcccaatacccggctgttgttgctgctgattgccccatttacaaatagtagtaccatcagccgggactcataccttggccatctgatcactttgtaccgcgaggctatcggtcagacacaggtagacgaacaaaccttccaggaaatcaccagtgtgagccgtgcgttaggacagcaagacaccgggagtctggaagccactttgaacttcctgctcaccaaccggcaacagaaaattccctcgcaattcacactgagtaccgaggaggagcgtatcttgcgttacgtgcaacagtctgtcagtttatacttaatgcgcgaggggatgaccccatcctcggctctggatatgacggcccgcaacatggaaccgtcgctgtattcgtccaatcggcctttcattaaccgcctaatggactacctgcatcgcgcggcagccatgaacagcgagtactttactaatgccattttgaacccccattggatgcccccctctggtttttatacgggagaatttgacatgcccgagggagatgacggcttcttgtgggacgacgtgtccgacagcatttttgtccctgcgcgttaccgcaagaaggaaggcggtgatgagctgcctttgcccttggtggaagcggcttccaggggccagagccctttcccaagcctcccatcgcttgttagcagcagcaacagcggacgggtgttgcgtccccggcttccaggggagacggactacctaaacgatcccctgttgcaacccgttcgtaataagaactttcctaacaacggggtggaaagtttggtagataaaatgaatcgctggaagacctacgctcaggagcagcgggagtgggaggagagccagtcccgccctttggccggccctttcagccgttggcgccggcgagaagacgaccaggatgactccgccgatgacaatagcgttttggacttggggggaactggtgcttcttccaaccccttcgcccacctacgtcctcagggccgcttgggcagattgtattaa

SEQ ID NO: 1426 - DNA, 1527 bp, Adenovirus F41
  MISC_FEATURE (1)..(1527): F41.ORF00011 PENTON BASE
atgagacgagcggtgggagtgccacccgtgatggcatacgcagagggtcctcctccttcttacgaaagcgtgatgggatcagcggattcgccggcaacgctggaggcgctctacgttcctccccgctacctggggcctacggaagggcgaaacagcattcgttactcagagttggcgccgctatatgacaccacccgggtttatctagtggataacaaatcggcagacattgcctccttgaactaccaaaatgaccacagcaactttcaaaccacggtggtgcagaacaatgacttcacaccagcggaggcggggacgcaaaccattaactttgacgagcgctcgcggtggggtgctgacctaaaaacaatcctgcgcacaaacatgcccaacataaacgagtttatgtctaccaacaagtttaaagctcggctaatggtagaaaaaaaaaataaggagactggtttaccgcgctacgagtggtttgagtttaccttgcccgaaggaaactactcggaaactatgaccattgatcttatgaataacgccattgtagacaactacttggaagtgggaagacaaaacggcgtgctagaaagcgacataggggtgaagtttgacacgcgcaatttccgtttgggttgggacccggtaaccaagcttgtcatgccaggcgtgtacaccaatgaagcgtttcatccggatattgttctattgccggggtgcggagtggattttacgcagagtcgtcttagtaatctgctgggaatccgtaagcggctgccgtttcaagaaggttttcaaatcatgtatgaggatttggagggaggtaacattccggccttgttagacgttgcaaagtatgaagctagcattcagaaagccaaagaggagggaaaagaaattggcgacgatacttttgcaacccgcccccaagatctggtaatcgaaccagtggcaaaagatagcaaaaatcgcagctacaatttgctgcctaatgatcaaaacaacaccgcatatcgcagctggtttttagcctacaactatggagaccccaagaagggagtgcaatcctggactttattgaccacagcggacgtcacgtgcgggtcgcagcaggtgtactggtctttacccgacatgatgcaagacccagtaacttttcgcccgtctacgcaagtcagcaactacccagtagtgggggttgaattgctgccagtacacgccaaaagtttctacaatgagcaggccgtttactctcagcttatccgccagtccaccgcgcttacacacgtcttcaatcgctttcctgagaatcagatactggtgcgtccgcccgctccgaccattaccaccgtcagtgaaaacgttcccgccctcacagatcacggaaccctgccgctgcgcagcagtatcagtggagtccagcgcgtgaccatcactgacgcccgccgtcggacctgtccctacgtgcacaaagccctgggcatagttgctccaaaagtgctttctagccgcaccttttaa

SEQ ID NO: 1427 - DNA, 552 bp, Adenovirus F41
  MISC_FEATURE (1)..(552): F41.ORF00012 PVII
atgtctattctaatctcgcccgataataataccggctgggggttgcactctgccggcatgtatggcggtgccaaaaggcgttccagccagcatcctgttcgtgtgcgagggcattaccgcgctccctggggggcccacacccggggcataatttccgcccgcaccaccgttgatgacgtgattgactctgtagtagccgacgctagacggtatcagcgacccacgtccacggtggattccgtgattgacagcgtggtagcagatgccaggcgctatgcgcagcgcaaaagccgtttgcggcgtcgccggcgacgacccacgactgccatgattgccgctcgagcggtgttaaggcgtgcgcgtcggataggacggcgagccatgcgccgagccgctgccgctgccagtgctggtcgagcccgccgtcaggccgctcgccaggctgccgcggccattgccagcatggcccagccccggcgagggaatgtctactgggtaagggacgcatcgggtgtgcgggtgccggtgcgaactcgaccccctcgaagttag

SEQ ID NO: 1428 - DNA, 1047 bp, Adenovirus F41
  MISC_FEATURE (1)..(1047): F41.ORF00013 V
atgagcaagcgcaagttcaaagaagagctgctggaggcccttgtgcccgaaatctatggccctgcggcggacgtcaagcccgacattaagccccgtgccctgaagcgtgttaaaaagcgggaaaaaaaagaggaaactgggttgttagatgatggtgtggagttcgttaggacctttgctcctcggcgacaggtgcagtggcgtggacgcaaagtgaagcgcgtgctccgacctggcaccactgtggtgttcactcctggcgagcggtctgccacacgggcattaaagcgggaatacgatgaggtttatgccgacgaagatattctggagcaggcagcccagcaaattggcgagttcgcctacggcaaacgcggtcgttacggagaggtggggctgttgctggatcaaagtaacccgactccaagcctgaagcccgcaacgcagcagcagattcttccagtaacggaaaccaaacggggcgtcaaaagggaaaacaaagacgaattgcagcctacaatgcaactcatggtgcccaagcggcagaagctggaggaagtgctggaaaatatgaaagtggacccaagcgttgagccggaagtaaaagtgcgccccattaaggaaataggtccaggtctgggagtgcaaacggtggatattcagatccccgtacgtaccactccagcagtggcaatggcagaagccatggaaacgcagacagatcagcctgcgcctgtgactacccgggaaataggtttgcaaacggacccaaggtacgagtctgttacttccacccgccgctcgcgcgtaagaaagtatacagccgccaactctatcctaccggagtatgccttacatccgtcaattacgccgacgcctggctatcgcggtacaatcttcagacccagccgccctcgaaccacccgccgtcgtcgcactacccggcgtcgatcgcgtcgcattacacccatctccgtgcaccgtgtaacccgccggggccgcacaattaccctgcccaatgcgcgttaccaccccagcattctcatttaa

SEQ ID NO: 1429 - DNA, 210 bp, Adenovirus F41
  MISC_FEATURE (1)..(210): F41.ORF00014 L2 PMU
atggctctgacttgccggtttcgcatcccagtttcgtcctaccgaggaagatctcgccgtaggagaggcatgttgggcagcgggcgccgacgcgctttgcgcaggcgtatgaaaggcggatttttgcccgcgctgattcccattatcgccgccgccattggcgcaatcccaggcattgcctctgtggcgttgcaagcacgcaaacaataa

SEQ ID NO: 1430 - DNA, 801 bp, Adenovirus F41
  MISC_FEATURE (1)..(801): F41.ORF00015 VI
atggaagacatcaattttgcgtcgctggcgccgcgtcacggctcgcggccgttcatgggcacctggaacgagatcgggaccagccagctcaacgggggcgctttcagttggagtagcctgtggagtggcattaaaaactttgggtcctccattaagtcctttggcaacaaggcctggaacagtaacactggtcagatgctgcgagataagttgaaggaccagaacttccaacaaaaagtggtggacggtctggcctcgggtataaatggcgtggtggatattgctaaccaggccttacaaaaccaaatcaatcagaggctggagaatagccgccaacctccagtagctctgaagcagcgaccaactcccgaaccagaagaggtggaagtggaagaaaaattacccccgttggaaacggcacctcccttgcctagcaagggtgagaaacggccgcgtcccgagctggaggaaaccctggttgtggaatcccgcgagcccccctcgtacgagcaggctttgaaagaaggagcttcgtatcccatgaccagacccattggctccatggccagaccggtttatgggaaagaaaaaactcccgtaacgttagaattgccaccacccgcgcccaccgtaccgcctatgccggctcccaccctgggtaccaacgttccccgccttgcggccccaaccgttgctgtggccactccggctcgcagagttcgcggtgccaattggcagagcactttgaacagcattgtgggtttgggagtgaaaagcctaaaacgccgccggtgctattaa

SEQ ID NO: 1431 - DNA, 2778 bp, Adenovirus F41
  MISC_FEATURE (1)..(2778): F41.ORF00016 L3 Hexon
atggccaccccctcgatgatgccgcaatggtcttacatgcacatcgccgggcaggacgcctcggagtatctgagtccgggcctggtgcagtttgcccgcgccaccgatacgtacttcagcctggggaacaagttcagaaaccccactgtggctccgacccacgatgtaaccacagacaggtcacagcgactgacgctgcgattcgtgccagtcgaccgcgaggacaccgcttattcttacaaagtgcgctttacgctggccgtgggcgacaaccgggtgttggacatggccagcacctactttgacatccgcggcgtgctggatcgtggccccagctttaaaccctactccggaaccgcctataactccctggctcctaaaacagcacccaatccatgcgaatggaaggacaacaacaaaataaaagttagaggacaagcaccccttataggaacaaacatagacaaagacaatgggattcagataggaacagacgcaacgacgaagcctatttatgccgacaaaacatatcaaccagagcctcaagtgggccaaacacagtggaacagtgaagttggtgccactgacaaggtagcgggtagggtattgaaagataccacgccaatgttaccatgctacgggtcttacgccaaaccaacaaatgaaaagggtggtcaggccaatcttataacaaacggaaccgatcaaactctaacaagcgacgttaacttacagttctttgccttggcaaacactcctaatgtgccaaaagccgttctttacgctgagaatgtggctattgaagcgcccgacacccatttggtgtacaagccagatgtagctcagggaaccgtaagttcggcagatcttttaacgcaacaggcagcgcccaacagaccaaactacattggctttagggataacttcattggcctgatgtactacaactccacaggcaatatgggcgtattggctgggcaggcttcacagctaaatgctgtagtggacttgcaagacaggaacactgagttatcgtaccaacttatgctggatgctcttggcgatcggagcagatatttttccatgtggaatcaggctgttgacagttacgaccccgacgtaagaatcattgagaaccacggagtggaggacgaattgccaaattactgctttccgctgggagggtctgcagctacagacacgtattctggcataaaagcaaacagcggaaactggactgcggacgacacttatgccgacagaggggcagaaattgagtctgggaatatttttgccatggaaatcaatttggcggccaatctctggcgcagcttcttatattccaatgtagccctgtatttgcctgactcatacaaaattacgccagacaacattacactacccgaaaacaagaacacctatgcctacatgaacggtcgggtggcggttcctagcgcccttgatacctacgtaaacatcggggcacggtggtctccagatcccatggacaatgttaaccccttcaatcaccaccgtaacgccggtctgcgctatcggtccatgctcttgggcaacgggcgttacgtacccttccacattcaagtcccccagaagttttttgccattaaaaatctcctcctgttacctggttcctacacctacgagtggaacttcaggaaggacgttaacatgatcctccagagcagtctgggtaacgacctgcgggtcgacggagccagcgtcaggttcgatagcattaatctgtacgccaacttttttcccatggctcacaacaccgcctccaccttggaagctatgctgcgcaatgacaccaacgaccaatcgtttaacgactacctttgcgctgcaaacatgctttatcccattccttctaatgctactagcgttcccatttctattccttcgcggaactgggccgcttttcggggctggagttttactcgactgaaaaccaaagaaaccccctctttgggttcgggatttgatccctactttacctactctggctccgttccatacttggatggtaccttttacctcaaccacacttttaaaaaggtgtccatcatgttcgactcctctgtgagctggcctggcaatgaccgactgcttacccccaatgagtttgaaatcaaacgcaccgtggatggggaagggtacaacgtggctcaatgtaacatgaccaaagactggtttctgattcagatgcttagtcactacaacattggatatcagggtttttatgtacccgaaagctacaaagatagaatgtattcctttttccgaaacttccagccaatgagtcgtcaggtggtaaacactaccacctacaaggaatatcagaatgttacccttcctttccagcataataactcaggctttgtgggatacatgggacccaccatgcgggagggacaagcttaccccgctaactacccttacccccttattggccaaacggccgtgccaagcctgacacagaaaaaattcctgtgcgatcgcaccatgtggcgcattccgttttccagcaacttcatgtctatgggggcactgaccgacctggggcagaacatgctgtatgccaattccgcccacgccctcgacatgacttttgaggtcgatcccatggatgagcccacacttctttatgttttgtttgaagttttcgacgtcgtgcgcatccaccagccccaccgcggcgtcatcgaggccgtctacctccgtacgccgttctcggccggtaacgccaccacataa

SEQ ID NO: 1432 - DNA, 645 bp, Adenovirus F41
  MISC_FEATURE (1)..(645): F41.ORF00017 L3 Protease
atgggctccagcgagcaggagctggccgccatcgtgcgtgacctgggttgcggaccctactttctaggcacctttgacaaacgtttcccgggctttatggctccgaacaagctggcctgcgctattgtgaacacggccgggcgtgaaacagggggcgttcactggttggccctggcctggaaccccaagagccatacctgttacctctttgacccgtttggcttttcggacgagcggctcaaacaaatttaccagtttgaatatgagggcctactaaagcgaagcgctttggcttccacgcctgaccactgcattacccttgtgaaatctacccagaccgttcagggacctttttctgccgcctgtggtcttttctgctgcatgtttttgcatgcttttatacactggcccagtaatccaatggagcaaaatcccacaatggatcttctcacgggcgtacctaacagcatgcttcaaagcccccaggtcgaacccaccctgcgtcggaatcaggaacgattgtatcgttttttgacccaacactctccctactttcgtcgtcaccgcgagcgaattgaaaaagctacagcttttgatcaaatgaaaaatgctcaagtgttgtttcataataaaattttttattga

SEQ ID NO: 1433 - DNA, 1425 bp, Adenovirus F41
  MISC_FEATURE (1)..(1425): F41.ORF00018 E2A DBP
ttaaaagggctcaatctccgcatcgccgtgaccggtgggaagggccacgttgcgatattgcaaacgggtgctccacttgaattcgggaataatcaacttgggcaaagggtcttcgacgttttccttccaaaattgtcgtaccagctgcagggcgcttataacgtcaggcgcagaaattttaaaatcacaattggggccagcgctaccgcgcgaattgcggtatacgggattagcacactggaacactagcacacaggggtggagtatgctggcaagagccgacttgtcggtaacttcgttggtcttcagatcttccgcgccgctcaaagcaaatggggttaccttacacatctgccgacccaattggggtacaagatccttcttgttaagacactcacagcgcaaagggattaatatgcgttgctgaccgcgttgcatctgcgggtattcggcttgcagaaacgcttgcatttgtttaaatgctatttgggctttaagcccctccgaaaaaaacagcccgcaggacttgctagaaaacatgttgttgccacagctcacatcttccgcgcagcaccgcgcgtcgtcattcttgatttggaccacgctgcgaccccagcggttctgaacaactttggttttgctaggttgctccttgagggcgcgctggccattctcgctgccaacatctacctccacaacttgctccttctgtatcatttctcgcccgtggaagcatctcaacacgccttcctcccgggtacagccatgagcccaaacagcgcagccggttgtatcccagttgtggtgcttcaccccagcgtaggtttccacgtaggcagccaggaatcgacccatgagctctgtaaaggttttctgggtggtgaatgtcaaagacaatccgcggcgttcctcattcaaccaggtctgacatatcttgcgataaacggcgttttgttcaggaagaaacttaaaagctgttttttcgtcattctccacgtgatatttctccatcaggacgttcatgagctccatgcccttctcccaagccgaaaccaatgggtcaacctgggggtttgttatcagcatggtcactgccttggaagagccggattgattattttcttcctcttctggtggcgttagatccctggggataacggttttctccaaacgcctaatttgtcgcttgccattgcccttttgtactacttctacgcctggatagctgaacccgtggtacagcacctcttcgtcctcctcgctgtccggaaccacttcgggcgacaaggtcggagcgtgtacttgctccggtacttgcaagtttttgcgcagctttttcttgggaggcaatgacggagggcgctccgggctcgtctcctggaggtagggagtaacggtggggtgctctcgctgacggccagccat

SEQ ID NO: 1434 - DNA, 2334 bp, Adenovirus F41
  MISC_FEATURE (1)..(2334): F41.ORF00019 100K
atggaggaggatcttatacagccgcagccagactccgaaaccttaaccagccccacctctgaggtcggcgccgtcgaactagtggaacatgaggatgatgagcgagtggagcaagacccgggctatgtgacgccgcccaaggacggcaaggaatcggtgccggtgtcgccgctcaccgaagcagactacctgggaggggaggacgacgtgcttctaaaacatgtgttgcggcagagcaccattgtgcaggaggccttcaaggattactctgggtttccgctgacggtggaggagttgagtcggacctacgaagctaatctcttttcaccgcgtgtgcccccaaaaaagcaagccaatggaacctgcgagcccaatccgcgcctcaacttttatccagtttttgcagtccccgaagcgttggctacctatcatattttttttaagaaccaacgcatccccctatcatgtcgtgccaaccgcacccaaggagaccgcattttgcatctcaaagccggcgctcacatacctgagattgtttccttggaggaagttcccaagatatttgaaggtcttggcaaagatgaaaaacgggcagcaaacgctctgcaaaaaagtgaaaccgaaaatcagaacgttctggtggaactggatggcgataacgcgcgtctcgccgtgctcaaacgcaccatcgaagtttcccactttgcctaccctgctcttaaccttccccccaaagttatgcgttcagtcatggatcatctccttatcaagcgggtcgaacctttagattcagatcagcccgaacaaaactccgaggacggccagcccgtggtttctgacgacgatctcgcacgctggcttgacacccatgaccccaccactttgcaagaacggcgcaaaatgatgatggcggtcattctgattaccgttgagctcgagtgcttgcaacgcttctttgccaatccccagacgctgcgcaagattgaggaatccctccattatgctttccgtcatggctacgttcgacaagcgtgtaaaatttctaatgtagagcttagcaacttagtttcctacatgggaattttacacgaaaaccgcctggggcaaaacgttctccattgcactttgcaaggtgaggcccgccgcgactacgttcgcgactgcatttatcttttcctaatcctaacctggcaaaccgcaatgggtgtctggcaacaatgtctagaggagcgtaacctccgcgagcttgaaaaactgctggttcgaaatcgccgcgagctttggacagcttttagcgaacgcacggccgcttgccagctggccgatctgatttttcccgaacgactcatgcaaacgctgcaaaacggcttgccagactttgttagtcagagcattttgcaaaactttcgctcttttatcctcgagcgatccggtatcttaccggctatgagctgcgccctaccctccgatttcgttccactttgctaccgcgaatgcccgccgcctctctggagtcattgctatctcctccgcctggcaaactacctagcccaccactccgacctcatggaaaattccagcggcgaaggattgctagaatgccactgccgctgcaacctctgcacaccccaccgctctctggtctgcaataccgagctgctcaacgaaacccaagtaatcggtacctttgaaatccaaggaccagagcagcaagagggtgcttccaatcttaagcttactccggcgctctggacttcagcctatttgcgcaaatttattccagaggactatcacgcccaccaaattaagttctacgaagaccaatcccgacctcccaaagcccccctcacggcttgtgtcatcacccagagccaaattttggcccaattgcaagccatccagcaggcgcgacaggagtttctgctaaaaaaaggtcacggggtttacttggatccccagaccggtgaggaactgaataccccgtcaccctccgccgccgcttcgtgccgcccgcagaaacatgccgcccaaagggaacaagcaagccattgcggatcggcggtcccaaaagcaacagaaactgcaagagcagtgggacgaggaggaggaatcctgggacgacagccaggcagaggaagtttcagacgaggaggaaatggagagctgggaaagtctagacgaggagctggaggacaaaccccccaaggacgaggaggaagaaatcatcgccagcgctgcggcgccgtcttccaaagaacccgctcggagccagcctccgacggggaaagtcggaccgtccccgccgcggccaggcttgttgaaagccagccgtag

SEQ ID NO: 1435 - DNA, 702 bp, Adenovirus F41
  MISC_FEATURE (1)..(702): F41.ORF00020 PVIII
atgagtaaggaaattcccacgccttacatgtggagctatcagccacagatgggcttggcagctggagcatctcaggactactctagtcgcatgaactggctaagtgccggcccccatatgattgggcgcgtaaatggaattcgcgccactcgaaaccaaattttgctggagcaagctgccctgacctccaccccgcgaagtcaattgaacccgcccaattggcccgctgcccaggtgtatcaggaaaaccccgctccgaccacagttctcctgccacgcgacgctgaggccgaagtccagatgactaactccggagcgcaattagcgggcggatccagacacgtcaggttcagaggtcggtcctcgccctactctccaggtcctataaagaggctgattatccgaggccggggtatccagctcaacgacgaagtggtgagctccttagccggcctccgacctgacggagttttccagcttggaggtgccggccgctcctccttcactcctcgccaggcgtacctgacactccagagctcttcttcccagcctcgctccggcggcattggaaccctccagtttgtggaggagtttgtaccctccgtttacttcaacccattctcgggcgctcctggtctttacccagacgacttcatcccaaactacgacgcggtgagcgaatctgtggacggctacgactga

SEQ ID NO: 1436 - DNA, 522 bp, Adenovirus F41
  MISC_FEATURE (1)..(522): F41.ORF00021 E3 19.4 KDA
atgaagatctgtgttcttttttgtgtgctaagtttaacaagtagcctaaagacttcacctacagccgttggttctttacgtcagctgcaagattccaacaaaggtacacaccaaactctttatttttctgagtctaccacttctattgcacttaactgttcttgtcgtaaccaactcgttcagtggcgcgctaacagacaattttgcaaactattttgggacgctcttattgttcaaggaaacaacagcctttgtaacaactgtactgctactactttaactcttacacctccttttgttcccggtccatacttgtgcattggcacaggaagagggcctagctgctttaatcgctggactttacaaaaagagaacctaaccactaccaccctccttccccttactacttatactttttcccaaaaaaaaatttactttttgcccattattgcacttttggcctttgtctgtgttattaccgctaattacattttaattttcaatcttgataatttttactaa

SEQ ID NO: 1437 - DNA, 831 bp, Adenovirus F41
  MISC_FEATURE (1)..(831): F41.ORF00022 E3 31.6K
atgctgctgtttttactttgccttcttttctgctctgcctatgccgccgtgccagaaaaaactcttaacaacctcgttcgggtgtacgccttagttggtaccaatctatcccttgattctatgaaaactcctcagattgacgaacttactagtcttagctggattaaacaggaagacaatcctaacaaaaacttacaatcatttttttttattggtcaaaaactctgtgaagttaccaaagacaaaatcactgtttttaactattatccgttggaattttcctgcgctaacgtaaccttgtatttgtataatcttaaaactgacgattctggcctctataatggaaaggcccataccaaagagcttgaacataacacctatgttaggctttatgttattgacattcctccgcctaagtgtgacattacttcacgttacttaggcatacaggctactggggaagattattgtttaattgaaatcaattgcactaactccaaatacccagctgtggttaaatttaatggcaggcaaagcaacttctaccattatgttagcgaaaacggaaacaaagaacttccaaatttttatgaaacacacatcactattaatggtacccacaaaagctttcactttaattacccttttaacgacctttgtcaaacaaccagcgctctacaatataatgacaatgtccaggtagtcctcattcttctcatagtagttggcttaataataatttccgctagtttaatattgctttattgccaccgcaaaaaaatcaaggccgaagttcaacatcaaccagtgcatatttgtttagaaaaataa

SEQ ID NO: 1438 - DNA, 273 bp, Adenovirus F41
  MISC_FEATURE (1)..(273): F41.ORF00023 E3 10.1K
atggtaactcctcttctcctgcttgtctgtctgccaattatctacgcctccaccaccttcgccgcagtctcccaccttgatacggattgtcttcccgccttgctgacttatctcatcttcacctctgtttgctgcactgccatctgcagcattgccactttttttgtggccattttccaaactgcggactacctatacgttagagtggcatactatcgtcatcatccccaatataggaaccacgaggtggccgcccttctgtgcctgtcatga

SEQ ID NO: 1439 - DNA, 324 bp, Adenovirus F41
  MISC_FEATURE (1)..(324): F41.ORF00024 E3 14.5K
atgaaagttcctcttctctgtcttatcctcctttacaaagtcctggccaactgccacctccaccggcccaccgagttcctgcgctgctactcaacagaaacctcttccttttggctgtactccattatttttattttgattttctttgccacctttttgggattacaaatttacggctgccttcacctgggctggatgcatcctcccaacaacctacccagatttcctggtttcttattacagcccccgccgcccccaccagctcctgtacagcgcgctccatcagttattagctactttcatcttaactctgaagatgtctga

SEQ ID NO: 1440 - DNA, 369 bp, Adenovirus F41
  MISC_FEATURE (1)..(369): F41.ORF00025 E3 14.7K
atgtctgaccaactagaaatcgacgggcagcgcactgagcagctgatccttgctcggcgaaaactcaaacaacaaaaccaggaattgttcaaccttcaagccttacaccaatgcaaaaagggtcttttctgcctggttaaacaagctgaactttgctatgatgtaacccaacaggggcatgagctatcatacactttaaacaagcaaagacagagctttatgactatggtgggggttaagcccattaaggttactcagcaatccggcccagttgagggaagcattctttgtcagtgcaccaattctgaatgcatgtacactatggtaaaaaccctgtgtggtctcagggaacttctcccctttaattaa

SEQ ID NO: 1441 - DNA, 162 bp, Adenovirus F41
  MISC_FEATURE (1)..(162): F41.ORF00026 TRUNCATED U EXON PROTEIN
ttaccttaaatttgatatcagttgtttgtcaagtttttccagcagcaccacctgcccttcctcccaactttcgtaggggatgtgccaacgggcagcaaactttctccacgtcctaaagggtatatcggtgttcacctttttaccctgacccacgatcttcat

SEQ ID NO: 1442 - DNA, 1164 bp, Adenovirus F41
  MISC_FEATURE (1)..(1164): F41.ORF00027 SHORT FIBER PROTEIN
atgaaaagaaccagaattgaagacgacttcaaccccgtctacccctatgacaccttctcaactcccagcatcccctatgtagctccgcccttcgtttcttctgacgggttacaggaaaaacccccaggagttttagcactcaagtacactgaccccattactaccaatgctaagcatgagcttactttaaaacttggaagcaacataactttagaaaatgggttactttcggccacagttcccactgtttctcctccccttacaaacagtaacaactccctgggtttagccacatccgctcccatagctgtatcagctaactctctcacattggccaccgccgcaccactgacagtaagcaacaaccagcttagtattaacgcgggcagaggcttagttataactaacaatgccgtagcggttaatcctaccggagcgttaggcttcaataacacaggagctttacaattaaatgctgcaggaggaatgagagtggacggtgccaacttaattcttcatgtagcatatccctttgaagcagtcaaccaactaacactgcgattagaaaacgggttagaagtaaccagcggaggaaagcttaacgttaagttgggatcaggcctccaatttgacagtaacggacgcattgctattagtaatagcaaccgaactcgaagtgtaccatccctcactaccatttggtctatctcgcctacgcctaactgctccatttatgaaacccaagatgcaaacctatttctttgtctaactaaaaacggagctcacgtattaggtactataacaatcaaaggtcttaaaggagcactgcgggaaatgcacgataacgctctatctctaaaacttccctttgacaatcagggaaatttacttaactgtgccttggaatcatccacctggcgttaccaggaaaccgacgcagtggcctctaatgccttaacatttatgcccaacagtacagtgtatccacgaaacaaaaccgctgacccaggcaacatgctcatccaaatctcgcctaacatcaccttcagtgtcgtctacaacgagataaacagtgggtatgcttttacttttaaatggtcagccgaaccgggaaaaccttttcacccacccaccgctgtattttgctacataactgaacaataa

SEQ ID NO: 1443 - DNA, 1689 bp, Adenovirus F41
  MISC_FEATURE (1)..(1689): F41.ORF00028 LONG FIBER PROTEIN
atgaaacgagccagacttgaagatgacttcaaccccgtctacccttacgaacactacaatccccttgacatcccatttattacacccccgtttgcctcctccaacggcttgcaagaaaaacctccgggagtcctcagcctgaaatacactgatccacttacaaccaaaaacggggctttaaccttaaaactgggcacgggactaaacattgatgaaaatggagatctttcttcagatgctagcgtggaagttagcgcccctattactaaaaccaacaaaatcgtaggtttaaattacactaaacctctcgccctgcgaagtaacgcgctcactctttcttacaacgctcccttaaacgtagtaaataacaatttagctctaaatatctcacaacctgtcactgttaatgcaaacaacgaactttctctcttaatagacgccccacttaatgctgacacgggcactcttcgccttcaaagtgctgcacctcttggactagtggacaaaacactaaaagttttgttttctagccccctctatctagataacaactttcttacactagccattgaacgcccgctagctctatccagtaacagagcagtgacccttaagtattcaccacctttaaaaatagaaaacgaaaacttaaccctaagcacaggcggaccttttactgtaagcgggggaaatctaaacttaacaacatcggcacccctctccgtgcaaaacaactctctctccttattcattacttctcctttaaaagttattaattctatgttagctgttggggttaacccgccttttaccatcactgactctggattagctatggacttaggagacggtcttgcactaggtggctctaagttaataatcaatcttggtccaggtttacaaatgtctaatggagccattactttagcactagatgcagcgctgcctttgcaatatagagacaaccaacttcaactcagaattggctcaacgtctggcttaattatgagcggagtaacacaaacattaaacgtcaatgccaataccggcaaaggtcttgctgttgaaaacaactcactagttgttaagcttgggaacggtcttcgctttgatagctggggaagcataactgtttcgcctactaccactacccctaccaccctatggaccaccgcagacccgtctcctaacgccactttttatgaatcactagacgccaaagtgtggctagttttagtaaaatgcaacggcatggttaacgggaccatatccattaaagctcagaaaggcattttacttagacctacagctagttttatttcctttgtcatgtatttctacagcgacggaacatggagaaaaaactatcccgtgtttgacaacgaagggatactagcaaacagtgccacgtggggttatcgacaaggacagtctgccaacactaacgtttctaatgctgtagaatttatgcctagctctaaaagatatcccaatcaaaaaggttctgaagttcagaacatggctcttacctacacttttttgcaaggtgatcctaacatggccatatcctttcagagtatttataatcatgcattagaaggctactcattaaaatttacctggcgcgttcgaaataatgaacgttttgacatcccctgctgctcattttcttatgtaacagaacaataa

SEQ ID NO: 1444 - DNA, 870 bp, Adenovirus F41
  MISC_FEATURE (1)..(870): F41.ORF00029 PUTATIVE E4 PROTEIN 6
tcaagctctccacgggttttcgcctctgttgtagtctgccaacgtaaacgggcagtaccgttccattaagccccgcagtaatccctgtctccggggttccaccaagcttttcagaagtgacctaacggtgaagcttcccaaaactttcaccgccttggcgagcaaccgccgcgtccgacgggcacagcatcgcacagaaagctcatccaagtttttacaataggtacagcccaacaccaccatattattcatgattccataactaaaaaaactccacccaaatgacatgcgctccaacactatagccgcatgcccatcatacagcaagcgaatatacataatatgtctacctctgacaaacacgctccccataaataacacttccttgggcatgccacagtttacaatttctcgataccaagggaatctcaagttatacagtgaaccataaatcatcattttaaaccagtttgctaacactacaccgcccgccttacattgaagagacccaggtttattacagtgacagtgtatagtccagcgctcaaaacctcttacaatttgattaaaatcaacattaagagtggcacaacaaacacaaacacgcatgtaaattctacacacatgcttttcccatttagacagtatcatgtcccaccacattggccattcctgcaatactataaagggagcacaagatggaatagacctcacctcgctcacataatgcatattcaaatgttcacactctaaaagtccaggagtcctttccattgtggcaatgggcacaaaatcctcagagggaggtggaaggcggtgggtttggtacgaactcagtttgtagcgaaaccatctgtcgcgttgcatcat

SEQ ID NO: 1445 - DNA, 366 bp, Adenovirus F41
  MISC_FEATURE (1)..(366): F41.ORF00030 PUTATIVE E4 PROTEIN 4
tcagagggaggtggaaggcggtgggtttggtacgaactcagtttgtagcgaaaccatctgtcgcgttgcatcataaattaaaagctcgcgcacagcttcgtacttctgttttaaaaagcgaacacgctgccaacaaatgttcgcaaaccgacggtttcgttggcgcgctctttcagttttcagggcagtgttcagccactcctgcagtccacttaacagctcctcagcccgtggagatatgctgacatcataccttattatgtccccataaacgttcaaacagcaggttaaagccaactccaaccaagcaatacaaaggccttgatcccgactcactggaggtggagggagagacggaagaggcat

SEQ ID NO: 1446 - DNA, 351 bp, Adenovirus F41
  MISC_FEATURE (1)..(351): F41.ORF00031 PUTATIVE E4 PROTEIN 3
ttattccagacggttgtaaagccagccaaagtgcaagtcacgaagatcacacctctccccaccgctgcgttggtaaaaaattacagccaagtcaaaaaagatgcgattttccaaattaccaatcaccgcttccactaaggctggcacacgcacttcaagaaacacaaacatagcaaaagcattttcctcaaaatcttcaaacattaagctgcaatcttgaataactcccaaataattttctgcttgccacccgcgcaacacatccattaaaatttcttgtagactggcgccatgcaattcaaaaagcttgttgagagcgccctctactgtcatacgcaggcacaccttcat

SEQ ID NO: 1447 - DNA, 393 bp, Adenovirus F41
  MISC_FEATURE (1)..(393): F41.ORF00032 PUTATIVE E4 PROTEIN 2
tcatggttgaaaaagatcaggttcccgtgtcacctgcagttcatttaaaagatcaacatcaggctcaaaaccccgatcccgaatctccgtgcgtagcattaattgtacaaagtcatccaaatcattgcatataagctctgtcagttcgctatcaggaagcagctcaggcgatgctacacaacaaatcatttctagcgtgggagctaaagacgttaaagtaaagccacaataagcagcttgaaaaactggagtaacacaatgtaaaatgtgcagcaaaaactccgacatgtttgtctttaaaaaatctaccacagaaatgtccatattatttaaataaaacatcaggggctgaggaaccaccaccgaaataaaaataggtcgtaacaaaaacat

1.-27. (canceled)

28. A method for cloning an adenoviral sequence, comprising:
a) providing a first linear nucleic acid molecule which comprises an adenoviral sequence;
b) providing a linearized medium copy plasmid which shares at least two regions of sequence homology with the first nucleic acid molecule; and
c) bringing the first nucleic acid molecule and the linearized medium copy plasmid into contact in the presence of a 5′ to 3′ exonuclease and an annealing protein such that the first linear nucleic acid and the linearized medium copy plasmid recombine to form a circular plasmid containing an adenoviral sequence.

29. The method of claim 28, wherein the first linear nuclear acid molecule is present in a mixture.

30. The method of claim 28, wherein the linearized medium copy plasmid comprises a region of sequence homology with the 5′ ITR of the adenoviral sequence in the first linear nucleic acid molecule and a region of sequence homology with the 3′ ITR of the adenoviral sequence in the first linear nucleic acid molecule.

31. The method of claim 28, wherein the adenoviral sequence is a full length adenoviral genome sequence, the 5′ to 3′ exonuclease is full length RecE, or a protein with at least 70% sequence identity to full length RecE, and the annealing protein is RecT.

32. The method of claim 28, wherein the linearized medium copy plasmid is a p15A origin-based vector.

33. A medium copy plasmid comprising a full length adenoviral genome sequence.

34. The medium copy plasmid according to claim 33, which comprises the full length adenoviral genome sequence contained within any one of SEQ ID NOs 1-32 or 1411, or a sequence at least 50% identical thereto.

35. The medium copy plasmid according to claim 34, wherein the genome sequence is contained within any one of SEQ ID NOs: 1-3, 5-8, 10-12, 14-15, 17-25, 27-32 and 1411, or a sequence at least 50% identical thereto.

36. The medium copy plasmid according to claim 33 which is a p15A origin-based vector.

37. The medium copy plasmid according to claim 33, which is obtainable by or which has been obtained by a method comprising:
a) providing a first linear nucleic acid molecule which comprises an adenoviral sequence;
b) providing a linearized medium copy plasmid which shares at least two regions of sequence homology with the first nucleic acid molecule; and
c) bringing the first nucleic acid molecule and the linearized medium copy plasmid into contact in the presence of a 5′ to 3′ exonuclease and an annealing protein such that the first linear nucleic acid and the linearized medium copy plasmid recombine to form a circular plasmid containing an adenoviral sequence.

38. A library of two or more medium copy plasmids according to claim 33, which comprises two or more full length adenoviral genome sequences, for example where the sequences are selected from SEQ ID NOs: 1-32 and 1411, or a sequence at least 50% identical thereto.

39. The library according to claim 38, which comprises five or more full length adenoviral genome sequences, for example, wherein the sequences are selected from SEQ ID NOs: 1-32 and 1411, or a sequence at least 50% identical thereto.

40. A method of generating an adenoviral vector or helper vector comprising one or more transgenes, comprising:
a) providing a first circular nucleic acid molecule comprising an adenoviral genome sequence contained within any one of SEQ ID NOs:1-32 and 1411 or a sequence at least 70% identical thereto, wherein the first circular nucleic acid molecule is a medium-copy plasmid according to claim 33;
b) providing a second linear nucleic acid molecule which shares at least one region of sequence homology with the first nucleic acid molecule, wherein the second linear nucleic acid molecule comprises the transgene or transgenes of interest; and
c) bringing the first and second nucleic acid molecules into contact in the presence of a 5′ to 3′ exonuclease and an annealing protein such that a deletion, mutation and/or insertion is introduced in the first nucleic acid molecule, and such that sequences between the regions of homology in the second nucleic acid molecule are introduced into the first nucleic acid molecule.

41. (canceled)

42. (canceled)

43. The method of claim 40, wherein the first circular nucleic acid molecule used in step a) has been modified to delete one or more regions of the adenoviral gene sequence, for example the E3 region, and wherein the transgene is inserted into the region corresponding to the deleted adenoviral sequence.

44. The method of claim 40, wherein at least one transgene is a reporter gene.

45. (canceled)

46. A medium copy plasmid obtained by or obtainable by a method according to claim 40, comprising an adenoviral genome sequence that has been modified to delete one or more regions of the adenoviral gene sequence and which has been modified to comprise one or more transgenes, further comprising restriction sites immediately upstream and downstream of the adenoviral sequence.

47. (canceled)

48. (canceled)

49. An adenoviral vector obtained by or obtainable by releasing the adenoviral sequence from the medium-copy plasmid according to claim 46 by restriction enzyme digest, comprising one or more reporter genes and means for their expression, replacing part or all of the E3 region.

50.-73. (canceled)

74. The adenoviral vector of claim 49, wherein the one or more reporter genes include a gene encoding a fluorescent protein and/or a luciferase gene.
